(19) United States
(12) Patent Application Publication
(10) Pub. No.: US 2021/0147550 A1
(43) Pub. Date: May 20, 2021

(54) ANTIGEN-BINDING PROTEINS TARGETING SHARED ANTIGENS

(71) Applicants: Joshua Michael FRANCIS, Emeryville, CA (US); Gijsbert Marnix GROTENBREG, Emeryville, CA (US); Gritstone Oncology, Inc., Emeryville, CA (US)

(72) Inventors: Karin Jooss, Emeryville, CA (US); Wade Blair, Emeryville, CA (US); Brendan Bulik-Sullivan, Emeryville, CA (US); Jennifer Busby, Emeryville, CA (US); Michele Anne Busby, Emeryville, CA (US); Joshua Michael Francis, Emeryville, CA (US); Gijsbert Marnix Grotenbreg, Emeryville, CA (US); Mojca Skoberne, Emeryville, CA (US); Roman Yelensky, Emeryville, CA (US)

(21) Appl. No.: 16/639,073

(22) PCT Filed: Aug. 17, 2018
(86) PCT No.: PCT/US18/46997

§ 371 Date: Feb. 13, 2020

Related U.S. Application Data
(60) Provisional application No. 62/547,146, filed on Aug. 18, 2017.
(60) Provisional application No. 62/581,368, filed on Nov. 3, 2017.

(51) Int. Cl. C07K 16/28; C07K 14/725; G01N 33/574

(52) U.S. Cl. CPC C07K 16/2833; C07K 14/7051; G01N 33/574; C07K 2317/32; G01N 2500/10; C07K 2317/55; C07K 2317/622; C07K 2317/92; G01N 2333/70539; C07K 2317/34

(57) ABSTRACT

Provided herein are HLA-PEPTIDE targets and antigen binding proteins that bind HLA-PEPTIDE targets. Also disclosed are methods for identifying the HLA-PEPTIDE targets as well as identifying one or more antigen binding proteins that bind a given HLA-PEPTIDE target.

### CROSS REFERENCE TO RELATED APPLICATIONS

[0001] This application claims the benefit of U.S. Provisional Application No. 62/547,146, filed on Aug. 18, 2017, and of U.S. Provisional Application No. 62/581,368, filed on Nov. 3, 2017, which applications are hereby incorporated in entirety by reference for all purposes.

### SEQUENCE LISTING

[0002] The instant application contains a Sequence Listing which has been filed electronically in ASCII format and is hereby incorporated by reference in its entirety. Said ASCII copy, created on Aug. 16, 2018, is named 40698PCT_CRF_sequencelisting.txt and is 1,591,443 bytes in size.

### BACKGROUND

[0003] The immune system employs two types of immune responses to provide antigen specific protection from pathogens; humoral immune responses, and cellular immune responses, which involve specific recognition of pathogen antigens via B lymphocytes and T lymphocytes, respectively.

[0004] T lymphocytes, by virtue of being the antigen specific effectors of cellular immunity, play a central role in the body's defense against diseases mediated by intracellular pathogens, such as viruses, intracellular bacteria, mycoplasmas, and intracellular parasites, by directly cytolysing cells infected by such pathogens. The specificity of T lymphocyte responses is conferred by, and activated through T-cell receptors (TCRs). T-cell receptors are antigen specific receptors clonally distributed on individual T lymphocytes whose repertoire of antigenic specificity is generated via somatic gene rearrangement mechanisms analogous to those involved in generating the antibody gene repertoire. T-cell receptors include a heterodimer of transmembrane molecules, the main type being composed of an alpha-beta polypeptide dimer and a smaller subset of a gamma-delta polypeptide dimer. T lymphocyte receptor subunits comprise a variable and constant region similar to immunoglobulins in the extracellular domain, a short hinge region with cysteine that promotes alpha and beta chain pairing, a transmembrane and a short cytoplasmic region. Signal transduction triggered by TCRs is indirectly mediated via CD3-zeta, an associated multi-subunit complex comprising signal transducing subunits.

[0005] T lymphocyte receptors do not generally recognize native antigens but rather recognize cell-surface displayed complexes comprising an intracellularly processed fragment of an antigen in association with a major histocompatibility complex (MHC) for presentation of peptide antigens. Major histocompatibility complex genes are highly polymorphic across species populations, comprising multiple common alleles for each individual gene.

[0006] Major histocompatibility complex class I molecules are expressed on the surface of virtually all nucleated cells in the body and are dimeric molecules comprising a transmembrane heavy chain, comprising the peptide antigen binding cleft, and a smaller extracellular chain termed beta2-microglobulin. MHC class I molecules present peptides derived from the degradation of cytosolic proteins by the proteasome, a multi-unit structure in the cytoplasm, (Niedermann G, 2002. Curr Top Microbiol Immunol. 268:91-136; for processing of bacterial antigens, refer to Wick M J, and Ljunggren H G, 1999. Immunol Rev. 172:153-62). Cleaved peptides are transported into the lumen of the endoplasmic reticulum (ER) by TAP where they are bound to the groove of the assembled class I molecule, and the resultant MHC/peptide complex is transported to the cell membrane to enable antigen presentation to T lymphocytes (Yewdell J W., 2001. Trends Cell Biol. 11:294-7; Yewdell J W. and Bennink J R., 2001. Curr Opin Immunol. 13:13-8). Alternatively, cleaved peptides can be loaded onto MHC class I molecules in TAP-independent manner and can also present extracellularly-derived proteins through a process of cross-presentation. As such, a given MHC/peptide complex presents a novel protein structure on the cell surface that can be targeted by a novel antigen-binding protein (e.g., antibodies or TCRs) once the identity of the complex's structure (peptide sequence and MHC subtype) is determined.

[0007] Tumor cells can express antigens and may display such antigens on the surface of the tumor cell. Such tumor-associated antigens can be used for development of novel immunotherapeutic reagents for the specific targeting of tumor cells. For example, tumor-associated antigens can be used to identify therapeutic antigen binding proteins, e.g., TCRs, antibodies, or antigen-binding fragments. Such tumor-associated antigens may also be utilized in pharmaceutical compositions, e.g., vaccines.

### SUMMARY

[0008] In an aspect, provided herein is an isolated antigen binding protein (ABP) that specifically binds to a human leukocyte antigen (HLA)-PEPTIDE target, wherein the HLA-PEPTIDE target comprises an HLA-restricted peptide complexed with an HLA Class I molecule, wherein the HLA-restricted peptide is located in the peptide binding groove of an al/2 heterodimer portion of the HLA Class I molecule, and wherein: the HLA Class I molecule is HLA subtype A*02:01 and the HLA-restricted peptide comprises the sequence LLASSILCA, the HLA Class I molecule is HLA subtype A*01:01 and the HLA-restricted peptide comprises the sequence EVDPIGHLY, the HLA Class I molecule is HLA subtype B*44:02 and the HLA-restricted peptide comprises the sequence GEMSSNSTAL, the HLA Class I molecule is HLA subtype A*02:01 and the HLA-restricted peptide comprises the sequence GVYDGEEHSV, the HLA Class I molecule is HLA subtype *01:01 and the HLA-restricted peptide comprises the sequence EVDPIGHVY, or the HLA Class I molecule is HLA subtype HLA-A*01:01 and the HLA-restricted peptide comprises the sequence NTDNNLAVY

[0009] In some embodiments, the HLA Class I molecule is HLA subtype A*02:01 and the HLA-restricted peptide consists of the sequence LLASSILCA, the HLA Class I molecule is HLA subtype A*01:01 and the HLA-restricted peptide consists of the sequence EVDPIGHLY, the HLA Class I molecule is HLA subtype B*44:02 and the HLA-restricted peptide consists of the sequence GEMSSNSTAL, the HLA Class I molecule is HLA subtype A*02:01 and the HLA-restricted peptide consists of the sequence GVYDGEEHSV, the HLA Class I molecule is HLA subtype *01:01 and the HLA-restricted peptide consists of the sequence EVDPIGHVY, or the HLA Class I molecule is HLA subtype HLA-A*01:01 and the HLA-restricted peptide consists of the sequence NTDNNLAVY

[0010] In some embodiments, the HLA-restricted peptide is between about 5-15 amino acids in length. In some embodiments, the HLA-restricted peptide is between about 8-12 amino acids in length.

[0011] In an aspect, the ABP comprises an antibody or antigen-binding fragment thereof.

[0012] In some embodiments, the HLA Class I molecule is HLA subtype A*02:01 and the HLA-restricted peptide comprises the sequence LLASSILCA. In some embodiments, the ABP comprises a CDR-H3 comprising a sequence set forth in any one of SEQ ID NOS: 3025-3032. In some embodiments, the ABP comprises a CDR-L3 comprising a sequence set forth in any one of SEQ ID NOS: 3043-3050 In some embodiments, the ABP comprises the CDR-H3 and the CDR-L3 from the scFv designated G7R3-P1C6, G7R3-P1G10, 1-G7R3-P1B4, 2-G7R4-P2C2, 3-G7R4-P1A3, 4-G7R4-B5-P2E9, 5-G7R4-B10-P1F8, or B7 (G7R3-P3A9). In some embodiments, the ABP comprises all three heavy chain CDRs and all three light chain CDRs from the scFv designated G7R3-P1C6, G7R3-P1G10, 1-G7R3-P1B4, 2-G7R4-P2C2, 3-G7R4-P1A3, 4-G7R4-B5-P2E9, 5-G7R4-B10-P1F8, or B7 (G7R3-P3A9). In some embodiments, the ABP comprises a VH sequence selected from SEQ ID NO: 2994-3001. In some embodiments, the ABP comprises a VL sequence selected from SEQ ID NO: 3002-3009. In some embodiments, the ABP comprises the VH sequence and VL sequence from the scFv designated G7R3-P1C6, G7R3-P1G10, 1-G7R3-P1B4, 2-G7R4-P2C2, 3-G7R4-P1A3, 4-G7R4-B5-P2E9, 5-G7R4-B10-P1F8, or B7 (G7R3-P3A9). In some embodiments, the ABP binds to the HLA-PEPTIDE target via any one or more of residues 1-5 of the restricted peptide LLASSILCA.

[0013] In some embodiments, the HLA Class I molecule is HLA subtype HLA-A*01:01 and the HLA-restricted peptide comprises the sequence NTDNNLAVY In some embodiments, the ABP comprises a CDR-H3 comprising a sequence set forth in any one of SEQ ID NOS: 2902-2933. In some embodiments, the ABP comprises a CDR-L3 comprising a sequence set forth in any one of SEQ ID NOS: 2971-2993. In some embodiments, the ABP comprises the CDR-H3 and the CDR-L3 from the scFv designated G2-P2E07, G2-P2E03, G2-P2A11, G2-P2C06, G2-P1G01, G2-P1C02, G2-P1H01, G2-P1B12, G2-P1B06, G2-P2H10, G2-P1H10, G2-P2C11, G2-P1C09, G2-P1A10, G2-P1B10, G2-P1D07, G2-P1E05, G2-P1D03, G2-P1G12, G2-P2H11, G2-P1C03, G2-P1G07, G2-P1F12, G2-P1G03, G2-P2B08, G2-P2A10, G2-P2D04, G2-P1C06, G2-P2A09, G2-P1B08, G2-P1E03, G2-P2A03, G2-P2F01, G2-P1H11, or G2-P1D06: In some embodiments, the ABP comprises all three heavy chain CDRs and all three light chain CDRs from the scFv designated G2-P2E07, G2-P2E03, G2-P2A11, G2-P2C06, G2-P1G01, G2-P1C02, G2-P1H01, G2-P1B12, G2-P1B06, G2-P2H10, G2-P1H10, G2-P2C11, G2-P1C09, G2-P1A10, G2-P1B10, G2-P1D07, G2-P1E05, G2-P1D03, G2-P1G12, G2-P2H11, G2-P1C03, G2-P1G07, G2-P1F12, G2-P1G03, G2-P2B08, G2-P2A10, G2-P2D04, G2-P1C06, G2-P2A09, G2-P1B08, G2-P1E03, G2-P2A03, G2-P2F01, G2-P1H11, or G2-P1D06: In some embodiments, the ABP comprises a VH sequence selected from SEQ ID NO: 2781-2815. In some embodiments, the ABP comprises a VL sequence selected from SEQ ID NO: 2816-2850. In some embodiments, the ABP comprises the VH sequence and VL sequence from the scFv designated G2-P2E07, G2-P2E03, G2-P2A11, G2-P2C06, G2-P1G01, G2-P1C02, G2-P1H01, G2-P1B12, G2-P1B06, G2-P2H10, G2-P1H10, G2-P2C11, G2-P1C09, G2-P1A10, G2-P1B10, G2-P1D07, G2-P1E05, G2-P1D03, G2-P1G12, G2-P2H11, G2-P1C03, G2-P1G07, G2-P1F12, G2-P1G03, G2-P2B08, G2-P2A10, G2-P2D04, G2-P1C06, G2-P2A09, G2-P1B08, G2-P1E03, G2-P2A03, G2-P2F01, G2-P1H11, or G2-P1D06. In some embodiments, the ABP binds to the HLA-PEPTIDE target via residues 6-9 of the restricted peptide NTDNNLAVY and via residues 157-160 of the HLA subtype allele A*0101. In some embodiments, the ABP binds to the HLA-PEPTIDE target via residues 3-8 of the restricted peptide NTDNNLAVY.

[0014] In another aspect, the ABP comprises a T cell receptor (TCR) or an antigen-binding portion thereof. In some embodiments, the TCR or antigen-binding portion thereof comprises a TCR variable region. In some embodiments, the TCR or antigen-binding portion thereof comprises one or more TCR complementarity determining regions (CDRs). In some embodiments, the TCR comprises an alpha chain and a beta chain. In some embodiments, the TCR comprises a gamma chain and a delta chain. In some embodiments, the antigen binding protein is a portion of a chimeric antigen receptor (CAR) comprising: an extracellular portion comprising the antigen binding protein; and an intracellular signaling domain. In some embodiments, the antigen binding protein comprises an scFv and the intracellular signaling domain comprises an ITAM. In some embodiments, the intracellular signaling domain comprises a signaling domain of a zeta chain of a CD3-zeta (CD3) chain. In some embodiments, the ABP further comprises a transmembrane domain linking the extracellular domain and the intracellular signaling domain. In some embodiments, the transmembrane domain comprises a transmembrane portion of CD28. In some embodiments, the ABP further comprises an intracellular signaling domain of a T cell costimulatory molecule. In some embodiments, the T cell costimulatory molecule is CD28, 4-1BB, OX-40, ICOS, or any combination thereof.

[0015] In some embodiments, the HLA Class I molecule is HLA subtype A*02:01 and the HLA-restricted peptide comprises the sequence LLASSILCA. In some embodiments, the ABP comprises a TCR alpha CDR3 sequence that is SEQ ID NO: 4277, 4278, 4279, 4280, or 4281. In some embodiments, the ABP comprises a TCR beta CDR3 sequence that is any one of SEQ ID NOS 4291-4295. In some embodiments, the ABP comprises an alpha CDR3 and a beta CDR3 sequence from any one of TCR clonotype ID #s: TCR19, TCR21, TCR22, TCR18, or TCR23. In some embodiments, the ABP comprises a TCR alpha variable (TRAV) amino acid sequence, a TCR alpha joining (TRAJ) amino acid sequence, a TCR beta variable (TRBV) amino acid sequence, a TCR beta diversity (TRBD) amino acid sequence, and a TCR beta joining (TRBJ) amino acid sequence, wherein each of the TRAV, TRAJ, TRBV, TRBD, and TRBJ amino acid sequences are at least 95%, 96%, 97%, 98%, 99%, or 100% identical to the corresponding TRAV, TRAJ, TRBV, TRBD, and TRBJ amino acid sequences for any one of the TCR clonotypes selected from TCR clonotype ID #s: TCR19, TCR21, TCR22, TCR18, and TCR23. In some embodiments, the ABP comprises a TCR alpha constant (TRAC) amino acid sequence. In some embodiments, the ABP comprises a TCR beta constant (TRBC) amino acid sequence. In some embodiments, the ABP comprises a TCR alpha VJ sequence having at least 95%, 96%, 97%, 98%, 99%, or 100% identity to any one of SEQ ID NOS 4306-4310. In some embodiments, the ABP comprises a TCR beta V(D)J sequence having at least 95%, 96%, 97%, 98%, 99%, or 100% identity to any one of SEQ ID NOS 4321-4325. In some embodiments, the ABP comprises a TCR alpha VJ amino acid sequence and a TCR beta V(D)J amino acid sequence, wherein each of the TCR alpha VJ and the TCR beta V(D)J amino acid sequences are at least 95%, 96%, 97%, 98%, 99%, or 100% identical to the corresponding TCR alpha VJ and TCR beta V(D)J amino acid sequences for any one of the TCR clonotypes selected from TCR clonotype ID #s: TCR19, TCR21, TCR22, TCR18, and TCR23.

[0016] In some embodiments, the HLA Class I molecule is HLA subtype A*01:01 and the HLA-restricted peptide comprises the sequence EVDPIGHLY. In some embodiments, the ABP comprises a TCR alpha CDR3 sequence that is any one of SEQ ID NOS: 4273-4276 or 3052-3350. In some embodiments, the ABP comprises a TCR beta CDR3 sequence that is any one of SEQ ID NOS: 4287-4290 or 3351-3655. In some embodiments, the ABP comprises an alpha CDR3 and a beta CDR3 sequence from any one of TCR ID #s: TCR101-TCR469, TCR2, TCR4, TCR53, TCR54, or TCR101-TCR469. In some embodiments, the ABP comprises a TCR alpha variable (TRAV) amino acid sequence, a TCR alpha joining (TRAJ) amino acid sequence, a TCR beta variable (TRBV) amino acid sequence, a TCR beta diversity (TRBD) amino acid sequence, and a TCR beta joining (TRBJ) amino acid sequence, wherein each of the TRAV, TRAJ, TRBV, TRBD, and TRBJ amino acid sequences are at least 95%, 96%, 97%, 98%, 99%, or 100% identical to the corresponding TRAV, TRAJ, TRBV, TRBD, and TRBJ amino acid sequences for any one of the TCR clonotypes selected from TCR ID #s: TCR101-TCR469, TCR2, TCR4, TCR53, TCR54, or TCR101-TCR469. In some embodiments, the ABP comprises a TCR alpha constant (TRAC) amino acid sequence. In some embodiments, the ABP comprises a TCR beta constant (TRBC) amino acid sequence. In some embodiments, the ABP comprises a TCR alpha VJ sequence having at least 95%, 96%, 97%, 98%, 99%, or 100% identity to any one of SEQ ID NOS: 3656-3961 or 4302-4305. In some embodiments, the ABP comprises a TCR beta V(D)J sequence having at least 95%, 96%, 97%, 98%, 99%, or 100% identity to any one of SEQ ID NOS: 3962-4269 or 4317-4320. In some embodiments, the ABP comprises a TCR alpha VJ amino acid sequence and a TCR beta V(D)J amino acid sequence, wherein each of the TCR alpha VJ and the TCR beta V(D)J amino acid sequences are at least 95%, 96%, 97%, 98%, 99%, or 100% identical to the corresponding TCR alpha VJ and TCR beta V(D)J amino acid sequences for any one of the TCR clonotypes selected from TCR ID #s: TCR101-TCR469, TCR2, TCR4, TCR53, and TCR54.

[0017] In some embodiments, the HLA Class I molecule is HLA subtype B*44:02 and the HLA-restricted peptide comprises the sequence GEMSSNSTAL. In some embodiments, the ABP comprises a TCR alpha CDR3 sequence that is be any one of SEQ ID NOS 4284-4286 or 3138. In some embodiments, the ABP comprises a TCR beta CDR3 sequence that is any one of SEQ ID NOS 4298-4301. In some embodiments, the ABP comprises an alpha CDR3 and a beta CDR3 sequence from any one of TCR ID #s: TCR29, TCR30, TCR32, or TCR33. In some embodiments, the ABP comprises a TCR alpha variable (TRAV) amino acid sequence, a TCR alpha joining (TRAJ) amino acid sequence, a TCR beta variable (TRBV) amino acid sequence, a TCR beta diversity (TRBD) amino acid sequence, and a TCR beta joining (TRBJ) amino acid sequence, wherein each of the TRAV, TRAJ, TRBV, TRBD, and TRBJ amino acid sequences are at least 95%, 96%, 97%, 98%, 99%, or 100% identical to the corresponding TRAV, TRAJ, TRBV, TRBD, and TRBJ amino acid sequences for any one of the TCR clonotypes selected from TCR ID #s: TCR29, TCR30, TCR32, or TCR33. In some embodiments, the ABP comprises a TCR alpha constant (TRAC) amino acid sequence. In some embodiments, the ABP comprises a TCR beta constant (TRBC) amino acid sequence. In some embodiments, the ABP comprises a TCR alpha VJ sequence having at least 95%, 96%, 97%, 98%, 99%, or 100% identity to any one of SEQ ID NOS: 4313-4316. In some embodiments, the ABP comprises a TCR beta V(D)J sequence having at least 95%, 96%, 97%, 98%, 99%, or 100% identity to any one of SEQ ID NOS: 4328-4331. In some embodiments, the ABP comprises a TCR alpha VJ amino acid sequence and a TCR beta V(D)J amino acid sequence, wherein each of the TCR alpha VJ and the TCR beta V(D)J amino acid sequences are at least 95%, 96%, 97%, 98%, 99%, or 100% identical to the corresponding TCR alpha VJ and TCR beta V(D)J amino acid sequences for any one of the TCR clonotypes selected from TCR ID #s: TCR29, TCR30, TCR32, or TCR33.

[0018] In some embodiments, the HLA Class I molecule is HLA subtype A*02:01 and the HLA-restricted peptide comprises the sequence GVYDGEEHSV In some embodiments, the ABP comprises a TCR alpha CDR3 sequence that is SEQ ID NO: 4282 or 4283. In some embodiments, the ABP comprises a TCR beta CDR3 sequence that is SEQ ID NO: 4296 or 4297. In some embodiments, the ABP comprises an alpha CDR3 and a beta CDR3 sequence from TCR clonotype ID #: TCR26 or TCR28. In some embodiments, the ABP comprises a TCR alpha variable (TRAV) amino acid sequence, a TCR alpha joining (TRAJ) amino acid sequence, a TCR beta variable (TRBV) amino acid sequence, a TCR beta diversity (TRBD) amino acid sequence, and a TCR beta joining (TRBJ) amino acid sequence, wherein each of the TRAV, TRAJ, TRBV, TRBD, and TRBJ amino acid sequences are at least 95%, 96%, 97%, 98%, 99%, or 100% identical to the corresponding TRAV, TRAJ, TRBV, TRBD, and TRBJ amino acid sequences for TCR ID #: TCR26 or TCR28. In some embodiments, the ABP comprises a TCR alpha constant (TRAC) amino acid sequence. In some embodiments, the ABP comprises a TCR beta constant (TRBC) amino acid sequence. In some embodiments, the ABP comprises a TCR alpha VJ sequence having at least 95%, 96%, 97%, 98%, 99%, or 100% identity to SEQ ID NO: 4311 or 4312. In some embodiments, the ABP comprises a TCR beta V(D)J sequence having at least 95%, 96%, 97%, 98%, 99%, or 100% identity to SEQ ID NO: 4326 or 4327. In some embodiments, the ABP comprises a TCR alpha VJ amino acid sequence and a TCR beta V(D)J amino acid sequence, wherein each of the TCR alpha VJ and the TCR beta V(D)J amino acid sequences are at least 95%, 96%, 97%, 98%, 99%, or 100% identical to the corresponding TCR alpha VJ and TCR beta V(D)J amino acid sequences for TCR ID #: TCR26 or TCR28.

[0019] In some embodiments, the HLA Class I molecule is HLA subtype HLA-A*01:01 and the HLA-restricted peptide comprises the sequence NTDNNLAVY In some embodiments, the HLA Class I molecule is HLA subtype HLA-A*03:01 and the HLA-restricted peptide comprises the sequence GVHGGILNK. In some embodiments, the HLA Class I molecule is HLA subtype HLA-A*01:01 and the HLA-restricted peptide comprises the sequence EVDPIGHVY

[0020] In another aspect, provided herein is an isolated antigen binding protein (ABP) that specifically binds to a human leukocyte antigen (HLA)-PEPTIDE target, wherein the HLA-PEPTIDE target comprises an HLA-restricted peptide complexed with an HLA Class I molecule, wherein the HLA-restricted peptide is located in in the peptide binding groove of an α1/α2 heterodimer portion of the HLA Class I molecule, and wherein the HLA-PEPTIDE target is selected from Table A. In some embodiments, the HLA-restricted peptide is not from a gene selected from WT1 or MART1. In some embodiments, the HLA-restricted peptide is between about 5-15 amino acids in length. In some embodiments, the HLA-restricted peptide is between about 8-12 amino acids in length. In some embodiments, the ABP comprises an antibody or antigen-binding fragment thereof.

[0021] In some embodiments of any of the antibodies or antigen binding fragments disclosed herein, the antigen binding protein is linked to a scaffold, optionally wherein the scaffold comprises serum albumin or Fc, optionally wherein Fc is human Fc and is an IgG (IgG1, IgG2, IgG3, IgG4), an IgA (IgA1, IgA2), an IgD, an IgE, or an IgM. In some embodiments of any of the antibodies or antigen binding fragments disclosed herein, the antigen binding protein is linked to a scaffold via a linker, optionally wherein the linker is a peptide linker, optionally wherein the peptide linker is a hinge region of a human antibody. In some embodiments of any of the antibodies or antigen binding fragments disclosed herein, the antigen binding protein comprises an Fv fragment, a Fab fragment, a F(ab′)2 fragment, a Fab′ fragment, an scFv fragment, an scFv-Fc fragment, and/or a single-domain antibody or antigen binding fragment thereof. In some embodiments of any of the antibodies or antigen binding fragments disclosed herein, the antigen binding protein comprises an scFv fragment. In some embodiments of any of the antibodies or antigen binding fragments disclosed herein, the antigen binding protein comprises one or more antibody complementarity determining regions (CDRs), optionally six antibody CDRs. In some embodiments of any of the antibodies or antigen binding fragments disclosed herein, the antigen binding protein comprises an antibody. In some embodiments of any of the antibodies or antigen binding fragments disclosed herein, the antigen binding protein is a monoclonal antibody. In some embodiments of any of the antibodies or antigen binding fragments disclosed herein, the antigen binding protein is a humanized, human, or chimeric antibody. In some embodiments of any of the antibodies or antigen binding fragments disclosed herein, the antigen binding protein is multispecific, optionally bispecific. In some embodiments of any of the antibodies or antigen binding fragments disclosed herein, the antigen binding protein binds greater than one antigen or greater than one epitope on a single antigen. In some embodiments of any of the antibodies or antigen binding fragments disclosed herein, the antigen binding protein comprises a heavy chain constant region of a class selected from IgG IgA, IgD, IgE, and IgM. In some embodiments of any of the antibodies or antigen binding fragments disclosed herein, the antigen binding protein comprises a heavy chain constant region of the class human IgG and a subclass selected from IgG1, IgG4, IgG2, and IgG3. In some embodiments of any of the antibodies or antigen binding fragments disclosed herein, the antigen binding protein comprises a modified Fc, optionally wherein the modified Fc comprises one or more mutations that extend half-life, optionally wherein the one or more mutations that extend half-life is YTE.

[0022] In another aspect, provided herein is an isolated HLA-PEPTIDE target, wherein the HLA-PEPTIDE target comprises an HLA-restricted peptide complexed with an HLA Class I molecule, wherein the HLA-restricted peptide is located in in the peptide binding groove of an α1/α2 heterodimer portion of the HLA Class I molecule, and wherein the HLA-PEPTIDE target is selected from Table A, with the proviso that the isolated HLA-PEPTIDE target is not any one of Target nos. 6364-6369, 6386-6389, 6500, 6521-6524, or 6578 and is not an HLA-PEPTIDE target found in Table B or Table C.

[0023] In some embodiments, the HLA Class I molecule is HLA subtype A*02:01 and the HLA-restricted peptide comprises the sequence LLASSILCA, the HLA Class I molecule is HLA subtype A*01:01 and the HLA-restricted peptide comprises the sequence EVDPIGHLY, the HLA Class I molecule is HLA subtype B*44:02 and the HLA-restricted peptide comprises the sequence GEMSSNSTAL, the HLA Class I molecule is HLA subtype A*02:01 and the HLA-rethe HLA Class I molecule is HLA subtype *01:01 and the HLA-restricted peptide comprises the sequence EVDPIGHVY, orstricted peptide comprises the sequence GVYDGEEHSV, the HLA Class I molecule is HLA subtype HLA-A*01:01 and the HLA-restricted peptide comprises the sequence NTDNNLAVY In some embodiments, the HLA Class I molecule is HLA subtype A*02:01 and the HLA-restricted peptide consists of or essentially consists of the sequence LLASSILCA In some embodiments, the HLA-restricted peptide is between about 5-15 amino acids in length. In some embodiments, the HLA-restricted peptide is between about 8-12 amino acids in length. In some embodiments, the association of the HLA subtype with the restricted peptide stabilizes non-covalent association of the β2-microglobin subunit of the HLA subtype with the α-subunit of the HLA subtype. In some embodiments, the stabilized association of the β2-microglobin subunit of the HLA subtype with the α-subunit of the HLA subtype is demonstrated by conditional peptide exchange. In some embodiments, the isolated HLA-PEPTIDE target further comprises an affinity tag. In some embodiments, the affinity tag is a biotin tag. In some embodiments, the isolated HLA-PEPTIDE target is complexed with a detectable label. In some embodiments, the detectable label comprises a β2-microglobin binding molecule. In some embodiments, the β2-microglobin binding molecule is a labeled antibody. In some embodiments, the labeled antibody is a fluorochrome-labeled antibody.

[0024] Also provided herein is a composition comprising an HLA-PEPTIDE target disclosed herein attached to a solid support. In some embodiments, the solid support comprises a bead, well, membrane, tube, column, plate, sepharose, magnetic bead, or chip. In some embodiments, the the HLA-PEPTIDE target comprises a first member of an affinity binding pair and the solid support comprises a second member of the affinity binding pair. In some embodiments, the first member is streptavidin and the second member is biotin.

[0025] Also provided herein is a reaction mixture comprising an isolated and purified α-subunit of an HLA subtype as described in Table A; an isolated and purified β2-microglobin subunit of the HLA subtype; an isolated and purified restricted peptide as described in Table A; and a reaction buffer.

[0026] Also provided herein is a an isolated HLA-PEPTIDE target disclosed herein; and a plurality of T-cells isolated from a human subject. In some embodiments, the the T-cells are CD8+ T-cells.

[0027] Also provided herein is an isolated polynucleotide comprising a first nucleic acid sequence encoding an HLA-restricted peptide disclosed herein, operably linked to a promoter, and a second nucleic acid sequence encoding an HLA subtype disclosed herein, wherein the second nucleic acid is operably linked to the same or different promoter as the first nucleic acid sequence, and wherein the encoded peptide and encoded HLA subtype form an HLA/peptide complex disclosed herein.

[0028] Also provided herein is a kit for expressing a stable HLA-PEPTIDE target disclosed herein, comprising a first construct comprising a first nucleic acid sequence encoding an HLA-restricted peptide disclosed herein operably linked to a promoter; and instructions for use in expressing the stable HLA-PEPTIDE complex. In some embodiments, the first construct further comprises a second nucleic acid sequence encoding an HLA subtype disclosed herein. In some embodiments, the second nucleic acid sequence is operably linked to the same or a different promoter. In some embodiments, the kit further comprises a second construct comprising a second nucleic acid sequence encoding an HLA subtype disclosed herein. In some embodiments, one or both of the first and second constructs are lentiviral vector constructs.

[0029] Also provided herein is a host cell comprising a heterologous HLA-PEPTIDE target disclosed herein. Also provided herein is a polynucleotide encoding an HLA-restricted peptide as described in Table A, e.g., a polynucleotide encoding an HLA-restricted peptide disclosed herein. In some embodiments, the does not comprise endogenous MHC. In some embodiments, the comprises an exogenous HLA. In some embodiments, the host cell is a K562 cell.

[0030] Also provided herein is a host cell as described above, and a cell culture medium comprising a restricted peptide as described in Table A. In some embodiments, the host cell is a cultured cell from a tumor cell line. In some embodiments, the tumor cell line is selected from the group consisting of HCC-1599, NCI-H510A, A375, LN229, NCI-H358, ZR-75-1, MS751, OE19, MOR, BV173, MCF-7, NCI-H82, and NCI-H146.

[0031] In some embodiments, the antigen binding protein binds to the HLA-PEPTIDE target through a contact point with the HLA Class I molecule and through a contact point with the HLA-restricted peptide of the HLA-PEPTIDE target.

[0032] In some embodiments, the ABP is for use as a medicament. In some embodiments, the ABP is for use in treatment of cancer, optionally wherein the cancer expresses or is predicted to express the HLA-PEPTIDE target. In some embodiments, the ABP is for use in treatment of cancer, wherein the cancer is selected from a solid tumor and a hematological tumor.

[0033] Also provided herein is an ABP which is a conservatively modified variant of an ABP disclosed herein. Also provided herein is an antigen binding protein (ABP) that competes for binding with the antigen binding protein disclosed herein. Also provided herein is an antigen binding protein (ABP) that binds the same HLA-PEPTIDE epitope bound by the antigen binding protein disclosed herein.

[0034] Also provided herein is an engineered cell expressing a receptor comprising the antigen binding protein disclosed herein. In some embodiments, the engineered cell is a T cell, optionally a cytotoxic T cell (CTL). In some embodiments, the antigen binding protein is expressed from a heterologous promoter.

[0035] Also provided herein is an isolated polynucleotide or set of polynucleotides encoding an antigen binding protein described herein or an antigen-binding portion thereof. Also provided herein is an isolated polynucleotide or set of polynucleotides encoding the HLA/peptide targets described herein. Also provided herein is an vector or set of vectors comprising the polynucleotide or set of polynucleotides as disclosed herein. Also provided herein is a host cell comprising the polynucleotide or set of polynucleotides disclosed herein, optionally wherein the host cell is CHO or HEK293, or optionally wherein the host cell is a T cell.

[0036] Also provided herein is a method of producing an antigen binding protein comprising expressing the antigen binding protein with the host cell as described above and isolating the expressed antigen binding protein.

[0037] Also provided herein is a pharmaceutical composition comprising the antigen binding protein disclosed herein and a pharmaceutically acceptable excipient. Also provided herein is a method of treating cancer in a subject, comprising administering to the subject an effective amount of the antigen binding protein disclosed herein or a pharmaceutical composition disclosed herein, optionally wherein the cancer is selected from a solid tumor and a hematological tumor. In some embodiments, the cancer expresses or is predicted to express the HLA-PEPTIDE target.

[0038] Also provided herein is a comprising the antigen binding protein disclosed herein or a pharmaceutical composition disclosed herein and instructions for use. Also provided herein is a composition comprising at least one HLA-PEPTIDE target disclosed herein and an adjuvant. Also provided herein is a least one HLA-PEPTIDE target disclosed herein and a pharmaceutically acceptable excipient. Also provided herein is a composition comprising an amino acid sequence comprising a polypeptide of at least one HLA-PEPTIDE target disclosed in Table A, optionally the amino acid sequence consisting essentially of or consisting of the polypeptide. Also provided herein is a virus comprising the isolated polynucleotide or set of polynucleotides disclosed herein In some embodiments, the virus is a filamentous phage. Also provided herein is a yeast cell comprising the isolated polynucleotide or set of polynucleotides disclosed herein.

[0039] Also provided herein is a method of identifying an antigen binding protein disclosed herein, comprising providing at least one HLA-PEPTIDE target listed in Table A; and binding the at least one target with the antigen binding protein, thereby identifying the antigen binding protein. In some embodiments, the antigen binding protein is present in a phage display library comprising a plurality of distinct antigen binding proteins. In some embodiments, the phage display library is substantially free of antigen binding proteins that non-specifically bind the HLA of the HLA-PEPTIDE target. In some embodiments, the antigen binding protein is present in a TCR library comprising a plurality of distinct TCRs or antigen binding fragments thereof. In some embodiments, the binding step is performed more than once, optionally at least three times. In some embodiments, the method further comprises contacting the antigen binding protein with one or more peptide-HLA complexes that are distinct from the HLA-PEPTIDE target to determine if the antigen binding protein selectively binds the HLA-PEPTIDE target, optionally wherein selectivity is determined by measuring binding affinity of the antigen binding protein to soluble target HLA-PEPTIDE complexes versus soluble HLA-PEPTIDE complexes that are distinct from target complexes, optionally wherein selectivity is determined by measuring binding affinity of the antigen binding protein to target HLA-PEPTIDE complexes expressed on the surface of one or more cells versus HLA-PEPTIDE complexes that are distinct from target complexes expressed on the surface of one or more cells.

[0040] Also provided herein is a method of identifying an antigen binding protein disclosed herein, comprising obtaining at least one HLA-PEPTIDE target listed in Table A; administering the HLA-PEPTIDE target to a subject, optionally in combination with an adjuvant; and isolating the antigen binding protein from the subject. In some embodiments, the isolating the antigen binding protein comprises screening the serum of the subject to identify the antigen binding protein. In some embodiments, the method further comprises contacting the antigen binding protein with one or more peptide-HLA complexes that are distinct from the HLA-PEPTIDE target to determine if the antigen binding protein selectively binds to the HLA-PEPTIDE target, optionally wherein selectivity is determined by measuring binding affinity of the antigen binding protein to soluble target HLA-PEPTIDE complexes versus soluble HLA-PEPTIDE complexes that are distinct from target complexes, optionally wherein selectivity is determined by measuring binding affinity of the antigen binding protein to target HLA-PEPTIDE complexes expressed on the surface of one or more cells versus HLA-PEPTIDE complexes that are distinct from target complexes expressed on the surface of one or more cells. In some embodiments, the subject is a mouse, a rabbit, or a llama. In some embodiments, the isolating the antigen binding protein comprises isolating a B cell from the subject that expresses the antigen binding protein and optionally directly cloning sequences encoding the antigen binding protein from the isolated B cell. In some embodiments, the method further comprises creating a hybridoma using the B cell. In some embodiments, the method further comprises cloning CDRs from the B cell. In some embodiments, the method further comprises immortalizing the B cell, optionally via EBV transformation. In some embodiments, the method further comprises creating a library that comprises the antigen binding protein of the B cell, optionally wherein the library is phage display or yeast display. In some embodiments, the method further comprises humanizing the antigen binding protein. Also provided herein is a method of identifying an antigen binding protein disclosed herein, comprising obtaining a cell comprising the antigen binding protein; contacting the cell with an HLA-multimer comprising at least one HLA-PEPTIDE target listed in Table A; and identifying the antigen binding protein via binding between the HLA-multimer and the antigen binding protein. Also provided herein is a method of identifying an antigen binding protein disclosed herein, comprising obtaining one or more cells comprising the antigen binding protein; activating the one or more cells with at least one HLA-PEPTIDE target listed in Table A presented on a natural or an artificial antigen presenting cell (APC); and identifying the antigen binding protein via selection of one or more cells activated by interaction with at least one HLA-PEPTIDE target listed in Table A. In some embodiments, the the cell is a T cell, optionally a CTL. In some embodiments, the method further comprises isolating the cell, optionally using flow cytometry, magnetic separation, or single cell separation. In some embodiments, the method further comprises sequencing the antigen binding protein.

[0041] Also provided herein is a method of identifying an antigen binding protein disclosed herein, comprising providing at least one HLA-PEPTIDE target listed in Table A; and identifying the antigen binding protein using the target.

### BRIEF DESCRIPTION OF THE SEVERAL VIEWS OF THE DRAWINGS

[0042] These and other features, aspects, and advantages of the present invention will become better understood with regard to the following description, and accompanying drawings, where:

[0043] FIG. 1 shows the general structure of a Human Leukocyte Antigen (HLA) Class I molecule. By User atropos235 on en.wikipedia—Own work, CC BY 2.5, https://commons.wikimedia.org/w/index.php?curid=1805424

[0044] FIG. 2 depicts exemplary construct elements for cloning TCRs into expression systems for therapy development.

[0045] FIG. 3 depicts an exemplary construct backbone sequence for cloning TCRs into expression systems for therapy development. FIG. 3 discloses SEQ ID NO: 4332.

[0046] FIG. 4 depicts an exemplary construct sequence for cloning a TCR specific for A*0201_LLASSILCA- (SEQ ID NO: 2737) into expression systems for therapy development. FIG. 4 discloses SEQ ID NO: 4333.

[0047] FIG. 5 depicts an exemplary exemplary construct sequence for cloning a TCR specific for A*0101_EVDPIGHLY (SEQ ID NO: 1) into expression systems for therapy development. FIG. 5 discloses SEQ ID NO: 4334.

[0048] FIG. 6 shows spectra data for peptide EVDPIGHLY (SEQ ID NO: 1). The figure contains the peptide fragmentation information as well as information related to the patient sample, including HLA types.

[0049] FIG. 7 shows spectra data for peptide GVHGGILNK (SEQ ID NO: 1424). The figure contains the peptide fragmentation information as well as information related to the patient sample, including HLA types.

[0050] FIG. 7A shows spectra data for peptide GVYDGEEHSV

[0051] FIG. 7B shows spectra data for peptide NTDNNLAVY

[0052] FIGS. 7C-7K show spectra data for additional peptides disclosed in Table A.

[0053] FIG. 8 shows the design of target screen 1 for the G2 target HLA-A*01:01_NTDNNLAVY (SEQ ID NO: 23).

[0054] FIG. 9A shows the target and minipool negative control design for the G2 target. FIG. 9A discloses SEQ ID NOS 23 and 4335-4337, respectively, in order of appearance.

[0055] FIG. 9B shows stability ELISA results for the G2 counterscreen “minipool” and G2 targets. FIG. 9B discloses SEQ ID NOS 23, 4335-4337 and 4363, respectively, in order of appearance.

[0056] FIG. 10 shows stability ELISA results for the additional G2 “complete” pool counterscreen peptides. FIG. 10 discloses SEQ ID NOS 4338-4352, respectively, in order of appearance.

[0057] FIG. 11 shows shows the design of target screen 2 for the G7 target HLA-A*02:01 LLASSILCA (SEQ ID NO: 2737).

[0058] FIG. 12 shows stability ELISA results for the additional G7 “complete pool” counterscreen peptides. FIG. 12 discloses SEQ ID NOS 4341-4343, 4350-4358 and 4335-4337, respectively, in order of appearance.

[0059] FIG. 13A shows the target and minipool negative control design for the G7 target. FIG. 13A discloses SEQ ID NOS 2737 and 4338-4340, respectively, in order of appearance.

[0060] FIG. 13B shows stability ELISA results for the G7 counterscreen “minipool” and G7 targets. FIG. 13B discloses SEQ ID NOS 2737, 4338-4340 and 4344, respectively, in order of appearance.

[0061] FIGS. 14A and 14B show phage panning results for the G2 and G7 targets, respectively.

[0062] FIGS. 15A and 15B show biolayer interferometry (BLI) results for G2 target Fab clone G-2P1H11 and G7 target G7R4-B5-P2E9, respectively.

[0063] FIG. 16 shows a map of the amino acid substitutions for the positional scanning experiment described herein. FIG. 16 discloses SEQ ID NOS 23 and 2737, respectively, in order of appearance.

[0064] FIG. 17A shows a stability heat map for the G2 positional variant-HLAs. FIG. 17A discloses SEQ ID NO: 23.

[0065] FIG. 17B shows an affinity heat map for Fab clone G2-P1H11. FIG. 17B discloses SEQ ID NO: 23.

[0066] FIG. 18A shows a stability heat map for the G7 positional variants. FIG. 18A discloses SEQ ID NO: 2737.

[0067] FIG. 18B shows an affinity heat map for Fab clone G7R4-B5-P2E9. FIG. 18B discloses SEQ ID NO: 2737.

[0068] FIG. 19 shows cell binding results for Fab clones G2-P1H11 and G7R4-B5-P2E9 to HLA-transduced K562 cells pulsed with target or negative control peptides.

[0069] FIG. 20 shows cell binding results for Fab clones G2-P1H11 and G7R4-B5-P2E9 to HLA-transduced K562 cells pulsed with target or negative control peptides.

[0070] FIG. 21 shows an example of hydrogen-deuterium exchange (HDX) data plotted on a crystal structure PDB 5bs0.

[0071] FIG. 22 shows an exemplary HDX heatmap for scFv clone G2-P1G07 visualized in its entirety using a consolidated perturbation view. FIG. 22 discloses SEQ ID NO: 4359.

[0072] FIG. 23 shows HDX heat maps across the HLA α1 and α2 helices for the tested G2 scFv and Fab clones. FIG. 23 discloses SEQ ID NOS 4360-4361, respectively, in order of appearance.

[0073] FIG. 24 shows an HDX heat map across the restricted peptide NTDNNLAVY (SEQ ID NO: 23) for the tested G2 scFv and Fab clones.

[0074] FIG. 25 depicts an experimental workflow by which TCRs which specifically bind HLA-PEPTIDE targets were isolated.

[0075] FIG. 26 shows a flow cytometry sorting procedure for sorting MHC-target-specific CD8+ T cells.

[0076] FIG. 27 shows flow cytometry results for exemplary HLA-PEPTIDE targets B*44:02_GEMSSNSTAL (SEQ ID NO: 2721) and A*01:01_EVDPIGHLY (SEQ ID NO: 1).

[0077] FIG. 28 shows flow cytometry results for the HLA-PETPIDE target A*03:01_GVHGGILNK (SEQ ID NO: 1424). FIG. 28 also discloses “EVDPIGHVY” as SEQ ID NO: 6.

[0078] FIG. 29A shows total number of isolated CD8+ T cells per HLA-PEPTIDE target summed across all donors tested. FIG. 29A discloses SEQ ID NOS 23, 302, 2737, 96, 1424, 2721, 6 and 1, respectively, in order of appearance.

[0079] FIG. 29B shows frequency of isolated CD8+ T cells per HLA-PEPTIDE target summed across all donors tested. FIG. 29B discloses SEQ ID NOS 1, 2737, 302, 1424, 6, 2721, 96 and 23, respectively, in order of appearance.

[0080] FIG. 30A depicts the number of unique TCR clonotypes per HLA-PEPTIDE target for each tested donor. FIG. 30A discloses SEQ ID NOS 23, 2737, 96, 1424, 2721, 6 and 1, respectively, in order of appearance.

[0081] FIG. 30B depicts the total number of unique clonotypes per HLA-PEPTIDE target, summed across all donors tested. FIG. 30B discloses SEQ ID NOS 23, 2737, 96, 1424, 2721, 6 and 1, respectively, in order of appearance.

[0082] FIG. 31 shows examples of Jurkat cells expressing A*0201_LLASSILCA- (SEQ ID NO: 2737), A*0201_GVYDGEEHSV- (SEQ ID NO: 96), B*4402_GEMSSNSTAL-(SEQ ID NO: 2721), and A*0101_EVDPIGHLY (SEQ ID NO: 1)-specific TCRs binding to their respective HLA-PEPTIDE targets but not to the control peptide tetramer.

[0083] FIG. 32 shows the gating strategy and flow data demonstrating that human CD8+ cells transduced with TCRs identified herein bind to their specific HLA-PEPTIDE target. FIG. 32 discloses SEQ ID NOS 2737 and 2737, respectively, in order of appearance.

[0084] FIG. 33 shows an exemplary lentiviral vector useful for transducing recipient cells with a TCR disclosed herein.

### DETAILED DESCRIPTION

[0085] Unless otherwise defined, all terms of art, notations and other scientific terminology used herein are intended to have the meanings commonly understood by those of skill in the art. In some cases, terms with commonly understood meanings are defined herein for clarity and/or for ready reference, and the inclusion of such definitions herein should not necessarily be construed to represent a difference over what is generally understood in the art. The techniques and procedures described or referenced herein are generally well understood and commonly employed using conventional methodologies by those skilled in the art, such as, for example, the widely utilized molecular cloning methodologies described in Sambrook et al., Molecular Cloning: A Laboratory Manual 4th ed. (2012) Cold Spring Harbor Laboratory Press, Cold Spring Harbor, N.Y. As appropriate, procedures involving the use of commercially available kits and reagents are generally carried out in accordance with manufacturer-defined protocols and conditions unless otherwise noted.

[0086] As used herein, the singular forms “a,” “an,” and “the” include the plural referents unless the context clearly indicates otherwise. The terms “include,” “such as,” and the like are intended to convey inclusion without limitation, unless otherwise specifically indicated.

[0087] As used herein, the term “comprising” also specifically includes embodiments “consisting of” and “consisting essentially of” the recited elements, unless specifically indicated otherwise. For example, a multispecific ABP “comprising a diabody” includes a multispecific ABP “consisting of a diabody” and a multispecific ABP “consisting essentially of a diabody.”

[0088] The term “about” indicates and encompasses an indicated value and a range above and below that value. In certain embodiments, the term “about” indicates the designated value ±10%, ±5%, or ±1%. In certain embodiments, where applicable, the term “about” indicates the designated value(s) ±one standard deviation of that value(s).

[0089] The term “immunoglobulin” refers to a class of structurally related proteins generally comprising two pairs of polypeptide chains: one pair of light (L) chains and one pair of heavy (H) chains. In an “intact immunoglobulin,” all four of these chains are interconnected by disulfide bonds. The structure of immunoglobulins has been well characterized. See, e.g., Paul, Fundamental Immunology 7th ed., Ch. 5 (2013) Lippincott Williams & Wilkins, Philadelphia, Pa. Briefly, each heavy chain typically comprises a heavy chain variable region (V_{H}) and a heavy chain constant region (C_{H}). The heavy chain constant region typically comprises three domains, abbreviated C_{H1}, C_{H2}, and C_{H3}. Each light chain typically comprises a light chain variable region (V_{L}) and a light chain constant region. The light chain constant region typically comprises one domain, abbreviated C_{L}.

[0090] The term “antigen binding protein” or “ABP” is used herein in its broadest sense and includes certain types of molecules comprising one or more antigen-binding domains that specifically bind to an antigen or epitope.

[0091] In some embodiments, the ABP comprises an antibody. In some embodiments, the ABP consists of an antibody. In some embodiments, the ABP consists essentially of an antibody. An ABP specifically includes intact antibodies (e.g., intact immunoglobulins), antibody fragments, ABP fragments, and multi-specific antibodies. In some embodiments, the ABP comprises an alternative scaffold. In some embodiments, the ABP consists of an alternative scaffold. In some embodiments, the ABP consists essentially of an alternative scaffold. In some embodiments, the ABP comprises an antibody fragment. In some embodiments, the ABP consists of an antibody fragment. In some embodiments, the ABP consists essentially of an antibody fragment. In some embodiments, the ABP comprises a TCR or antigen binding portion thereof. In some embodiments, the ABP consists of a TCR or antigen binding portion thereof. In some embodiments, the ABP consists essentially of a TCR or antigen binding portion thereof. In some embodiments, a CAR comprises an ABP. An “HLA-PEPTIDE ABP,” “anti-HLA-PEPTIDE ABP,” or “HLA-PEPTIDE-specific ABP” is an ABP, as provided herein, which specifically binds to the antigen HLA-PEPTIDE. An ABP includes proteins comprising one or more antigen-binding domains that specifically bind to an antigen or epitope via a variable region, such as a variable region derived from a B cell (e.g., antibody) or T cell (e.g., TCR).

[0092] The term “antibody” herein is used in the broadest sense and includes polyclonal and monoclonal antibodies, including intact antibodies and functional (antigen-binding) antibody fragments, including fragment antigen binding (Fab) fragments, F(ab′)2 fragments, Fab′ fragments, Fv fragments, recombinant IgG (rIgG) fragments, variable heavy chain (VH) regions capable of specifically binding the antigen, single chain antibody fragments, including single chain variable fragments (scFv), and single domain antibodies (e.g., sdAb, sdFv, nanobody) fragments. The term encompasses genetically engineered and/or otherwise modified forms of immunoglobulins, such as intrabodies, peptibodies, chimeric antibodies, fully human antibodies, humanized antibodies, and heteroconjugate antibodies, multispecific, e.g., bispecific, antibodies, diabodies, triabodies, and tetrabodies, tandem di-scFv, tandem tri-scFv. Unless otherwise stated, the term “antibody” should be understood to encompass functional antibody fragments thereof. The term also encompasses intact or full-length antibodies, including antibodies of any class or sub-class, including IgG and sub-classes thereof, IgM, IgE, IgA, and IgD.

[0093] As used herein, “variable region” refers to a variable nucleotide sequence that arises from a recombination event, for example, it can include a V, J, and/or D region of an immunoglobulin or T cell receptor (TCR) sequence from a B cell or T cell, such as an activated T cell or an activated B cell.

[0094] The term “antigen-binding domain” means the portion of an ABP that is capable of specifically binding to an antigen or epitope. One example of an antigen-binding domain is an antigen-binding domain formed by an antibody V_{H}-V_{L} dimer of an ABP. Another example of an antigen-binding domain is an antigen-binding domain formed by diversification of certain loops from the tenth fibronectin type III domain of an Adnectin. An antigen-binding domain can include antibody CDRs 1, 2, and 3 from a heavy chain in that order; and antibody CDRs 1, 2, and 3 from a light chain in that order. An antigen-binding domain can include TCR CDRs, e.g., αCDR1, αCDR2, αCDR3, βCDR1, βCDR2, and βCDR3. TCR CDRs are described herein.

[0095] The antibody V_{H} and V_{L} regions may be further subdivided into regions of hypervariability (“hypervariable regions (HVRs);” also called “complementarity determining regions” (CDRs)) interspersed with regions that are more conserved. The more conserved regions are called framework regions (FRs). Each V_{H} and V_{L} generally comprises three antibody CDRs and four FRs, arranged in the following order (from N-terminus to C-terminus): FR1-CDR1-FR2-CDR2-FR3-CDR3-FR4. The antibody CDRs are involved in antigen binding, and influence antigen specificity and binding affinity of the ABP. See Kabat et al., Sequences of Proteins of Immunological Interest 5th ed. (1991) Public Health Service, National Institutes of Health, Bethesda, Md., incorporated by reference in its entirety.

[0096] The light chain from any vertebrate species can be assigned to one of two types, called kappa (κ) and lambda (λ), based on the sequence of its constant domain.

[0097] The heavy chain from any vertebrate species can be assigned to one of five different classes (or isotypes): IgA, IgD, IgE, IgG, and IgM. These classes are also designated α, δ, ε, γ, and μ, respectively. The IgG and IgA classes are further divided into subclasses on the basis of differences in sequence and function. Humans express the following subclasses: IgG1, IgG2, IgG3, IgG4, IgA1, and IgA2.

[0098] The amino acid sequence boundaries of an antibody CDR can be determined by one of skill in the art using any of a number of known numbering schemes, including those described by Kabat et al., supra (“Kabat” numbering scheme); Al-Lazikani et al., 1997, J. Mol. Biol., 273:927-948 (“Chothia” numbering scheme); MacCallum et al., 1996, J. Mol. Biol. 262:732-745 (“Contact” numbering scheme); Lefranc et al., Dev. Comp. Immunol., 2003, 27:55-77 (“IMGT” numbering scheme); and Honegge and Plückthun, J. Mol. Biol., 2001, 309:657-70 (“AHo” numbering scheme); each of which is incorporated by reference in its entirety.

[0099] Table 14 provides the positions of antibody CDR-L1, CDR-L2, CDR-L3, CDR-H1, CDR-H2, and CDR-H3 as identified by the Kabat and Chothia schemes. For CDR-H1, residue numbering is provided using both the Kabat and Chothia numbering schemes.

[0100] Antibody CDRs may be assigned, for example, using ABP numbering software, such as Abnum, available at www.bioinf.org.uk/abs/abnum/, and described in Abhinandan and Martin, Immunology, 2008, 45:3832-3839, incorporated by reference in its entirety.

TABLE 14
Residues in CDRs according to Kabat
and Chothia numbering schemes.

| CDR | Kabat | Chothia |
|---|---|---|
| L1 | L24-L34 | L24-L34 |
| L2 | L50-L56 | L50-L56 |
| L3 | L89-L97 | L89-L97 |
| H1 (Kabat Numbering) | H31-H35B | H26-H32 or H34* |
| H1 (Chothia Numbering) | H31-H35 | H26-H32 |
| H2 | H50-H65 | H52-H56 |
| H3 | H95-H102 | H95-H102 |

*The C-terminus of CDR-H1, when numbered using the Kabat numbering convention, varies between H32 and H34, depending on the length of the CDR.

[0101] The “EU numbering scheme” is generally used when referring to a residue in an ABP heavy chain constant region (e.g., as reported in Kabat et al., supra). Unless stated otherwise, the EU numbering scheme is used to refer to residues in ABP heavy chain constant regions described herein.

[0102] The terms “full length antibody,” “intact antibody,” and “whole antibody” are used herein interchangeably to refer to an antibody having a structure substantially similar to a naturally occurring antibody structure and having heavy chains that comprise an Fc region. For example, when used to refer to an IgG molecule, a “full length antibody” is an antibody that comprises two heavy chains and two light chains.

[0103] The amino acid sequence boundaries of a TCR CDR can be determined by one of skill in the art using any of a number of known numbering schemes, including but not limited to the IMGT unique numbering, as described by LeFranc, M.-P, Immunol Today. 1997 November; 18(11):509; Lefranc, M.-P., “IMGT Locus on Focus: A new section of Experimental and Clinical Immunogenetics”, Exp. Clin. Immunogenet., 15, 1-7 (1998); Lefranc and Lefranc, The T Cell Receptor FactsBook; and M.-P. Lefranc/Developmental and Comparative Immunology 27 (2003) 55-77, all of which are incorporated by reference.

[0104] An “ABP fragment” comprises a portion of an intact ABP, such as the antigen-binding or variable region of an intact ABP. ABP fragments include, for example, Fv fragments, Fab fragments, F(ab′)₂ fragments, Fab′ fragments, scFv (sFv) fragments, and scFv-Fc fragments. ABP fragments include antibody fragments. Antibody fragments can include Fv fragments, Fab fragments, F(ab′)₂ fragments, Fab′ fragments, scFv (sFv) fragments, scFv-Fc fragments, and TCR fragments.

[0105] “Fv” fragments comprise a non-covalently-linked dimer of one heavy chain variable domain and one light chain variable domain.

[0106] “Fab” fragments comprise, in addition to the heavy and light chain variable domains, the constant domain of the light chain and the first constant domain (C_{H1}) of the heavy chain. Fab fragments may be generated, for example, by recombinant methods or by papain digestion of a full-length ABP.

[0107] “F(ab′)₂” fragments contain two Fab′ fragments joined, near the hinge region, by disulfide bonds. F(ab′)₂ fragments may be generated, for example, by recombinant methods or by pepsin digestion of an intact ABP. The F(ab′) fragments can be dissociated, for example, by treatment with ß-mercaptoethanol.

[0108] “Single-chain Fv” or “sFv” or “scFv” fragments comprise a V_{H} domain and a V_{L} domain in a single polypeptide chain. The V_{H} and V_{L} are generally linked by a peptide linker. See Plückthun A. (1994). Any suitable linker may be used. In some embodiments, the linker is a (GGGGS)ₙ. In some embodiments, n=1, 2, 3, 4, 5, or 6. See ABPs from Escherichia coli. In Rosenberg M. & Moore G. P. (Eds.), The Pharmacology of Monoclonal ABPs vol. 113 (pp. 269-315). Springer-Verlag, New York, incorporated by reference in its entirety.

[0109] “scFv-Fc” fragments comprise an scFv attached to an Fc domain. For example, an Fc domain may be attached to the C-terminal of the scFv. The Fc domain may follow the V_{H} or V_{L}, depending on the orientation of the variable domains in the scFv (i.e., V_{H}-V_{L} or V_{L}-V_{H}). Any suitable Fc domain known in the art or described herein may be used. In some cases, the Fc domain comprises an IgG4 Fc domain.

[0110] The term “single domain antibody” refers to a molecule in which one variable domain of an ABP specifically binds to an antigen without the presence of the other variable domain. Single domain ABPs, and fragments thereof, are described in Arabi Ghahroudi et al., FEBS Letters, 1998, 414:521-526 and Muyldermans et al., Trends in Biochem. Sci., 2001, 26:230-245, each of which is incorporated by reference in its entirety. Single domain ABPs are also known as sdAbs or nanobodies.

[0111] The term “Fc region” or “Fc” means the C-terminal region of an immunoglobulin heavy chain that, in naturally occurring antibodies, interacts with Fc receptors and certain proteins of the complement system. The structures of the Fc regions of various immunoglobulins, and the glycosylation sites contained therein, are known in the art. See Schroeder and Cavacini, J. Allergy Clin. Immunol., 2010, 125:S41-52, incorporated by reference in its entirety. The Fc region may be a naturally occurring Fc region, or an Fc region modified as described in the art or elsewhere in this disclosure.

[0112] The term “alternative scaffold” refers to a molecule in which one or more regions may be diversified to produce one or more antigen-binding domains that specifically bind to an antigen or epitope. In some embodiments, the antigen-binding domain binds the antigen or epitope with specificity and affinity similar to that of an ABP. Exemplary alternative scaffolds include those derived from fibronectin (e.g., Adnectins™), the β-sandwich (e.g., iMab), lipocalin (e.g., Anticalins®), EETI-II/AGRP, BPTI/LACI-D1/ITI-D2 (e.g., Kunitz domains), thioredoxin peptide aptamers, protein A (e.g., Affibody®), ankyrin repeats (e.g., DARPins), gamma-B-crystallin/ubiquitin (e.g., Affilins), CTLD₃ (e.g., Tetranectins), Fynomers, and (LDLR-A module) (e.g., Avimers). Additional information on alternative scaffolds is provided in Binz et al., Nat. Biotechnol., 2005 23:1257-1268; Skerra, Current Opin. in Biotech., 2007 18:295-304; and Silacci et al., J Biol. Chem., 2014, 289:14392-14398; each of which is incorporated by reference in its entirety. An alternative scaffold is one type of ABP.

[0113] A “multispecific ABP” is an ABP that comprises two or more different antigen-binding domains that collectively specifically bind two or more different epitopes. The two or more different epitopes may be epitopes on the same antigen (e.g., a single HLA-PEPTIDE molecule expressed by a cell) or on different antigens (e.g., different HLA-PEPTIDE molecules expressed by the same cell, or a HLA-PEPTIDE molecule and a non-HLA-PEPTIDE molecule). In some aspects, a multi-specific ABP binds two different epitopes (i.e., a “bispecific ABP”). In some aspects, a multi-specific ABP binds three different epitopes (i.e., a “trispecific ABP”).

[0114] A “monospecific ABP” is an ABP that comprises one or more binding sites that specifically bind to a single epitope. An example of a monospecific ABP is a naturally occurring IgG molecule which, while divalent (i.e., having two antigen-binding domains), recognizes the same epitope at each of the two antigen-binding domains. The binding specificity may be present in any suitable valency.

[0115] The term “monoclonal antibody” refers to an antibody from a population of substantially homogeneous antibodies. A population of substantially homogeneous antibodies comprises antibodies that are substantially similar and that bind the same epitope(s), except for variants that may normally arise during production of the monoclonal antibody. Such variants are generally present in only minor amounts. A monoclonal antibody is typically obtained by a process that includes the selection of a single antibody from a plurality of antibodies. For example, the selection process can be the selection of a unique clone from a plurality of clones, such as a pool of hybridoma clones, phage clones, yeast clones, bacterial clones, or other recombinant DNA clones. The selected antibody can be further altered, for example, to improve affinity for the target (“affinity maturation”), to humanize the antibody, to improve its production in cell culture, and/or to reduce its immunogenicity in a subject.

[0116] The term “chimeric antibody” refers to an antibody in which a portion of the heavy and/or light chain is derived from a particular source or species, while the remainder of the heavy and/or light chain is derived from a different source or species.

[0117] “Humanized” forms of non-human antibodies are chimeric antibodies that contain minimal sequence derived from the non-human antibody. A humanized antibody is generally a human antibody (recipient antibody) in which residues from one or more CDRs are replaced by residues from one or more CDRs of a non-human antibody (donor antibody). The donor antibody can be any suitable non-human antibody, such as a mouse, rat, rabbit, chicken, or non-human primate antibody having a desired specificity, affinity, or biological effect. In some instances, selected framework region residues of the recipient antibody are replaced by the corresponding framework region residues from the donor antibody. Humanized antibodies may also comprise residues that are not found in either the recipient antibody or the donor antibody. Such modifications may be made to further refine antibody function. For further details, see Jones et al., Nature, 1986, 321:522-525; Riechmann et al., Nature, 1988, 332:323-329; and Presta, Curr. Op. Struct. Biol., 1992, 2:593-596, each of which is incorporated by reference in its entirety.

[0118] A “human antibody” is one which possesses an amino acid sequence corresponding to that of an antibody produced by a human or a human cell, or derived from a non-human source that utilizes a human antibody repertoire or human antibody-encoding sequences (e.g., obtained from human sources or designed de novo). Human antibodies specifically exclude humanized antibodies.

[0119] “Affinity” refers to the strength of the sum total of non-covalent interactions between a single binding site of a molecule (e.g., an ABP) and its binding partner (e.g., an antigen or epitope). Unless indicated otherwise, as used herein, “affinity” refers to intrinsic binding affinity, which reflects a 1:1 interaction between members of a binding pair (e.g., ABP and antigen or epitope). The affinity of a molecule X for its partner Y can be represented by the dissociation equilibrium constant (K_{D}). The kinetic components that contribute to the dissociation equilibrium constant are described in more detail below. Affinity can be measured by common methods known in the art, including those described herein, such as surface plasmon resonance (SPR) technology (e.g., BIACORE®) or biolayer interferometry (e.g., FORTEBIO®).

[0120] With regard to the binding of an ABP to a target molecule, the terms “bind,” “specific binding,” “specifically binds to,” “specific for,” “selectively binds,” and “selective for” a particular antigen (e.g., a polypeptide target) or an epitope on a particular antigen mean binding that is measurably different from a non-specific or non-selective interaction (e.g., with a non-target molecule). Specific binding can be measured, for example, by measuring binding to a target molecule and comparing it to binding to a non-target molecule. Specific binding can also be determined by competition with a control molecule that mimics the epitope recognized on the target molecule. In that case, specific binding is indicated if the binding of the ABP to the target molecule is competitively inhibited by the control molecule. In some aspects, the affinity of a HLA-PEPTIDE ABP for a non-target molecule is less than about 50% of the affinity for HLA-PEPTIDE. In some aspects, the affinity of a HLA-PEPTIDE ABP for a non-target molecule is less than about 40% of the affinity for HLA-PEPTIDE. In some aspects, the affinity of a HLA-PEPTIDE ABP for a non-target molecule is less than about 30% of the affinity for HLA-PEPTIDE. In some aspects, the affinity of a HLA-PEPTIDE ABP for a non-target molecule is less than about 20% of the affinity for HLA-PEPTIDE. In some aspects, the affinity of a HLA-PEPTIDE ABP for a non-target molecule is less than about 10% of the affinity for HLA-PEPTIDE. In some aspects, the affinity of a HLA-PEPTIDE ABP for a non-target molecule is less than about 1% of the affinity for HLA-PEPTIDE. In some aspects, the affinity of a HLA-PEPTIDE ABP for a non-target molecule is less than about 0.1% of the affinity for HLA-PEPTIDE.

[0121] The term “k_{d}” (sec⁻¹), as used herein, refers to the dissociation rate constant of a particular ABP—antigen interaction. This value is also referred to as the k_{off} value.

[0122] The term “kₐ” (M⁻¹×sec⁻¹), as used herein, refers to the association rate constant of a particular ABP-antigen interaction. This value is also referred to as the kₒₙ value.

[0123] The term “K_{D}” (M), as used herein, refers to the dissociation equilibrium constant of a particular ABP-antigen interaction. K_{D}=k_{d}/kₐ. In some embodiments, the affinity of an ABP is described in terms of the K_{D} for an interaction between such ABP and its antigen. For clarity, as known in the art, a smaller K_{D} value indicates a higher affinity interaction, while a larger K_{D} value indicates a lower affinity interaction.

[0124] The term “K_{A}” (M⁻¹), as used herein, refers to the association equilibrium constant of a particular ABP-antigen interaction. K_{A}=kₐ/k_{d}.

[0125] An “immunoconjugate” is an ABP conjugated to one or more heterologous molecule(s), such as a therapeutic (cytokine, for example) or diagnostic agent.

[0126] “Fc effector functions” refer to those biological activities mediated by the Fc region of an ABP having an Fc region, which activities may vary depending on isotype. Examples of ABP effector functions include C1q binding to activate complement dependent cytotoxicity (CDC), Fc receptor binding to activate ABP-dependent cellular cytotoxicity (ADCC), and ABP dependent cellular phagocytosis (ADCP).

[0127] When used herein in the context of two or more ABPs, the term “competes with” or “cross-competes with” indicates that the two or more ABPs compete for binding to an antigen (e.g., HLA-PEPTIDE). In one exemplary assay, HLA-PEPTIDE is coated on a surface and contacted with a first HLA-PEPTIDE ABP, after which a second HLA-PEPTIDE ABP is added. In another exemplary assay, a first HLA-PEPTIDE ABP is coated on a surface and contacted with HLA-PEPTIDE, and then a second HLA-PEPTIDE ABP is added. If the presence of the first HLA-PEPTIDE ABP reduces binding of the second HLA-PEPTIDE ABP, in either assay, then the ABPs compete with each other. The term “competes with” also includes combinations of ABPs where one ABP reduces binding of another ABP, but where no competition is observed when the ABPs are added in the reverse order. However, in some embodiments, the first and second ABPs inhibit binding of each other, regardless of the order in which they are added. In some embodiments, one ABP reduces binding of another ABP to its antigen by at least 25%, at least 50%, at least 60%, at least 70%, at least 80%, at least 85%, at least 90%, or at least 95%. A skilled artisan can select the concentrations of the ABPs used in the competition assays based on the affinities of the ABPs for HLA-PEPTIDE and the valency of the ABPs. The assays described in this definition are illustrative, and a skilled artisan can utilize any suitable assay to determine if ABPs compete with each other. Suitable assays are described, for example, in Cox et al., “Immunoassay Methods,” in Assay Guidance Manual [Internet], Updated Dec. 24, 2014 (www.ncbi.nlm.nih.gov/books/NBK92434/; accessed Sep. 29, 2015); Silman et al., Cytometry, 2001, 44:30-37; and Finco et al., J. Pharm. Biomed. Anal., 2011, 54:351-358; each of which is incorporated by reference in its entirety.

[0128] The term “epitope” means a portion of an antigen that specifically binds to an ABP. Epitopes frequently consist of surface-accessible amino acid residues and/or sugar side chains and may have specific three dimensional structural characteristics, as well as specific charge characteristics. Conformational and non-conformational epitopes are distinguished in that the binding to the former but not the latter may be lost in the presence of denaturing solvents. An epitope may comprise amino acid residues that are directly involved in the binding, and other amino acid residues, which are not directly involved in the binding. The epitope to which an ABP binds can be determined using known techniques for epitope determination such as, for example, testing for ABP binding to HLA-PEPTIDE variants with different point-mutations, or to chimeric HLA-PEPTIDE variants.

[0129] Percent “identity” between a polypeptide sequence and a reference sequence, is defined as the percentage of amino acid residues in the polypeptide sequence that are identical to the amino acid residues in the reference sequence, after aligning the sequences and introducing gaps, if necessary, to achieve the maximum percent sequence identity. Alignment for purposes of determining percent amino acid sequence identity can be achieved in various ways that are within the skill in the art, for instance, using publicly available computer software such as BLAST, BLAST-2, ALIGN, MEGALIGN (DNASTAR), CLUSTALW, CLUSTAL OMEGA, or MUSCLE software. Those skilled in the art can determine appropriate parameters for aligning sequences, including any algorithms needed to achieve maximal alignment over the full length of the sequences being compared.

[0130] A “conservative substitution” or a “conservative amino acid substitution,” refers to the substitution an amino acid with a chemically or functionally similar amino acid. Conservative substitution tables providing similar amino acids are well known in the art. By way of example, the groups of amino acids provided in Tables 15-17 are, in some embodiments, considered conservative substitutions for one another.

TABLE 15
Selected groups of amino acids that are considered conservative
substitutions for one another, in certain embodiments.

| | |
|---|---|
| Acidic Residues | D and E |
| Basic Residues | K, R and H |
| Hydrophilic Uncharged Residues | S, T, N, and Q |
| Aliphatic Uncharged Residues | G, A, V, L, and I |
| Non-polar Uncharged Residues | C, M, and P |
| Aromatic Residues | F, Y, and W |

TABLE 16
Additional selected groups of amino acids that
are considered conservative substitutions
for one another, in certain embodiments.

| | |
|---|---|
| Group 1 | A, S, and T |
| Group 2 | D and E |
| Group 3 | N and Q |
| Group 4 | R and K |
| Group 5 | I, L and M |
| Group 6 | F, Y, and W |

TABLE 17
Further selected groups of amino acids that are considered conservative
substitutions for one another, in certain embodiments.

| | |
|---|---|
| Group A | A and G |
| Group B | D and E |
| Group C | N and Q |
| Group D | R, K, and H |
| Group E | I, L, M, V |
| Group F | F, Y, and W |
| Group G | S and T |
| Group H | C and M |

[0131] Additional conservative substitutions may be found, for example, in Creighton, Proteins: Structures and Molecular Properties 2nd ed. (1993) W. H. Freeman & Co., New York, N.Y. An ABP generated by making one or more conservative substitutions of amino acid residues in a parent ABP is referred to as a “conservatively modified variant.”

[0132] The term “amino acid” refers to the twenty common naturally occurring amino acids. Naturally occurring amino acids include alanine (Ala; A), arginine (Arg; R), asparagine (Asn; N), aspartic acid (Asp; D), cysteine (Cys; C); glutamic acid (Glu; E), glutamine (Gln; Q), Glycine (Gly; G); histidine (His; H), isoleucine (Ile; I), leucine (Leu; L), lysine (Lys; K), methionine (Met; M), phenylalanine (Phe; F), proline (Pro; P), serine (Ser; S), threonine (Thr; T), tryptophan (Trp; W), tyrosine (Tyr; Y), and valine (Val; V).

[0133] The term “vector,” as used herein, refers to a nucleic acid molecule capable of propagating another nucleic acid to which it is linked. The term includes the vector as a self-replicating nucleic acid structure as well as the vector incorporated into the genome of a host cell into which it has been introduced. Certain vectors are capable of directing the expression of nucleic acids to which they are operatively linked. Such vectors are referred to herein as “expression vectors.”

[0134] The terms “host cell,” “host cell line,” and “host cell culture” are used interchangeably and refer to cells into which an exogenous nucleic acid has been introduced, and the progeny of such cells. Host cells include “transformants” (or “transformed cells”) and “transfectants” (or “transfected cells”), which each include the primary transformed or transfected cell and progeny derived therefrom. Such progeny may not be completely identical in nucleic acid content to a parent cell, and may contain mutations.

[0135] The term “treating” (and variations thereof such as “treat” or “treatment”) refers to clinical intervention in an attempt to alter the natural course of a disease or condition in a subject in need thereof. Treatment can be performed both for prophylaxis and during the course of clinical pathology. Desirable effects of treatment include preventing occurrence or recurrence of disease, alleviation of symptoms, diminishment of any direct or indirect pathological consequences of the disease, preventing metastasis, decreasing the rate of disease progression, amelioration or palliation of the disease state, and remission or improved prognosis.

[0136] As used herein, the term “therapeutically effective amount” or “effective amount” refers to an amount of an ABP or pharmaceutical composition provided herein that, when administered to a subject, is effective to treat a disease or disorder.

[0137] As used herein, the term “subject” means a mammalian subject. Exemplary subjects include humans, monkeys, dogs, cats, mice, rats, cows, horses, camels, goats, rabbits, and sheep. In certain embodiments, the subject is a human. In some embodiments the subject has a disease or condition that can be treated with an ABP provided herein. In some aspects, the disease or condition is a cancer. In some aspects, the disease or condition is a viral infection.

[0138] The term “package insert” is used to refer to instructions customarily included in commercial packages of therapeutic or diagnostic products (e.g., kits) that contain information about the indications, usage, dosage, administration, combination therapy, contraindications and/or warnings concerning the use of such therapeutic or diagnostic products.

[0139] The term “tumor” refers to all neoplastic cell growth and proliferation, whether malignant or benign, and all pre-cancerous and cancerous cells and tissues. The terms “cancer,” “cancerous,” “cell proliferative disorder,” “proliferative disorder” and “tumor” are not mutually exclusive as referred to herein. The terms “cell proliferative disorder” and “proliferative disorder” refer to disorders that are associated with some degree of abnormal cell proliferation. In some embodiments, the cell proliferative disorder is a cancer. In some aspects, the tumor is a solid tumor. In some aspects, the tumor is a hematologic malignancy.

[0140] The term “pharmaceutical composition” refers to a preparation which is in such form as to permit the biological activity of an active ingredient contained therein to be effective in treating a subject, and which contains no additional components which are unacceptably toxic to the subject in the amounts provided in the pharmaceutical composition.

[0141] The terms “modulate” and “modulation” refer to reducing or inhibiting or, alternatively, activating or increasing, a recited variable.

[0142] The terms “increase” and “activate” refer to an increase of 10%, 20%, 30%, 40%, 50%, 60%, 70%, 75%, 80%, 85%, 90%, 95%, 100%, 2-fold, 3-fold, 4-fold, 5-fold, 10-fold, 20-fold, 50-fold, 100-fold, or greater in a recited variable.

[0143] The terms “reduce” and “inhibit” refer to a decrease of 10%, 20%, 30%, 40%, 50%, 60%, 70%, 75%, 80%, 85%, 90%, 95%, 2-fold, 3-fold, 4-fold, 5-fold, 10-fold, 20-fold, 50-fold, 100-fold, or greater in a recited variable.

[0144] The term “agonize” refers to the activation of receptor signaling to induce a biological response associated with activation of the receptor. An “agonist” is an entity that binds to and agonizes a receptor.

[0145] The term “antagonize” refers to the inhibition of receptor signaling to inhibit a biological response associated with activation of the receptor. An “antagonist” is an entity that binds to and antagonizes a receptor.

[0146] The terms “nucleic acids” and “polynucleotides” may be used interchangeably herein to refer to polymeric form of nucleotides of any length, either deoxyribonucleotides or ribonucleotides, or analogs thereof. Polynucleotides can include, but are not limited to coding or non-coding regions of a gene or gene fragment, loci (locus) defined from linkage analysis, exons, introns, messenger RNA (mRNA), cDNA, recombinant polynucleotides, branched polynucleotides, plasmids, vectors, isolated DNA, isolated RNA, nucleic acid probes, and primers. A polynucleotide may comprise modified nucleotides, such as methylated nucleotides and nucleotide analogs. Exemplary modified nucleotides include, e.g., 5-fluorouracil, 5-bromouracil, 5-chlorouracil, 5-iodouracil, hypoxanthine, xanthine, 4-acetylcytosine, 5-(carboxyhydroxymethyl) uracil, 5-carboxymethylaminomethyl-2-thiouridine, 5-carboxymethylaminomethyluracil, dihydrouracil, beta-D-galactosylqueosine, inosine, N6-isopentenyladenine, 1-methylguanine, 1-methylinosine, 2,2-dimethylguanine, 2-methyladenine, 2-methylguanine, 3-methylcytosine, 5-methylcytosine, N6-substituted adenine, 7-methylguanine, 5-methylaminomethyluracil, 5-methoxyaminomethyl-2-thiouracil, beta-D-mannosylqueosine, 5′-methoxycarboxymethyluracil, 5-methoxyuracil, 2-methylthioN6-isopentenyladenine, uracil-5-oxyacetic acid (v), wybutoxosine, pseudouracil, queosine, 2-thiocytosine, 5-methyl-2-thiouracil, 2-thiouracil, 4-thiouracil, 5-methyluracil, uracil-5-oxyacetic acid methylester, 3-(3-amino-3-N-2-carboxypropyl) uracil, and 2,6-diaminopurine.

[0147] Isolated HLA-Peptide Targets

[0148] The major histocompatibility complex (MHC) is a complex of antigens encoded by a group of linked loci, which are collectively termed H-2 in the mouse and HLA in humans. The two principal classes of the MHC antigens, class I and class II, each comprise a set of cell surface glycoproteins which play a role in determining tissue type and transplant compatibility. In transplantation reactions, cytotoxic T-cells (CTLs) respond mainly against class I glycoproteins, while helper T-cells respond mainly against class II glycoproteins.

[0149] Human major histocompatibility complex (MHC) class I molecules, referred to interchangeably herein as HLA Class I molecules, are expressed on the surface of nearly all cells. These molecules function in presenting peptides which are mainly derived from endogenously synthesized proteins to CD8+ T cells via an interaction with the alpha-beta T-cell receptor. The class I MHC molecule comprises a heterodimer composed of a 46-kDa a chain which is non-covalently associated with the 12-kDa light chain beta-2 microglobulin. The α chain generally comprises α1 and α2 domains which form a groove for presenting an HLA-restricted peptide, and an α3 plasma membrane-spanning domain which interacts with the CD8 co-receptor of T-cells. FIG. 1 (prior art) depicts the general structure of a Class I HLA molecule.

[0150] Class I MHC-restricted peptides (also referred to interchangeably herein as HLA-restricted antigens, HLA-restricted peptides, MHC-restricted antigens, restricted peptides, or peptides) generally bind to the heavy chain alpha1-alpha2 groove via about two or three anchor residues that interact with corresponding binding pockets in the MHC molecule. The beta-2 microglobulin chain plays an important role in MHC class I intracellular transport, peptide binding, and conformational stability. For most class I molecules, the formation of a heterotrimeric complex of the MHC class I heavy chain, peptide (self, non-self, and/or antigenic) and beta-2 microglobulin leads to protein maturation and export to the cell-surface.

[0151] Binding of a given HLA subtype to an HLA-restricted peptide forms a complex with a unique and novel surface that can be specifically recognized by an ABP such as, e.g., a TCR on a T cell or an antibody or antigen-binding fragment thereof. HLA complexed with an HLA-restricted peptide is referred to herein as an HLA-PEPTIDE or HLA-PEPTIDE target. In some cases the restricted peptide is located in the α1/α2 groove of the HLA molecule. In some cases the restricted peptide is bound to the α1/α2 groove of the HLA molecule via about two or three anchor residues that interact with corresponding binding pockets in the HLA molecule.

[0152] Accordingly, provided herein are antigens comprising HLA-PEPTIDE targets. The HLA-PEPTIDE targets may comprise a specific HLA-restricted peptide having a defined amino acid sequence complexed with a specific HLA subtype.

[0153] HLA-PEPTIDE targets identified herein may be useful for cancer immunotherapy. In some embodiments, the HLA-PEPTIDE targets identified herein are presented on the surface of a tumor cell. The HLA-PEPTIDE targets identified herein may be expressed by tumor cells in a human subject. The HLA-PEPTIDE targets identified herein may be expressed by tumor cells in a population of human subjects. For example, the HLA-PEPTIDE targets identified herein may be shared antigens which are commonly expressed in a population of human subjects with cancer.

[0154] The HLA-PEPTIDE targets identified herein may have a prevalence with an individual tumor type The prevalence with an individual tumor type may be about 0.1%, 0.2%, 0.3%, 0.4%, 0.5%, 0.6%, 0.7%, 0.8%, 0.9%, 1%, 1%, 2%, 3%, 4%, 5%, 6%, 7%, 8%, 9%, 10%, 11%, 12%, 13%, 14%, 15%, 16%, 17%, 18%, 19%, 20%, 21%, 22%, 23%, 24%, 25%, 26%, 27%, 28%, 29%, 30%, 31%, 32%, 33%, 34%, 35%, 36%, 37%, 38%, 39%, 40%, 41%, 42%, 43%, 44%, 45%, 46%, 47%, 48%, 49%, 50%, 51%, 52%, 53%, 54%, 55%, 56%, 57%, 58%, 59%, 60%, 61%, 62%, 63%, 64%, 65%, 66%, 67%, 68%, 69%, 70%, 71%, 72%, 73%, 74%, 75%, 76%, 77%, 78%, 79%, 80%, 81%, 82%, 83%, 84%, 85%, 86%, 87%, 88%, 89%, 90%, 91%, 92%, 93%, 94%, 95%, 96%, 97%, 98%, 99%, or 100%. The prevalence with an individual tumor type may be about 0.1%-100%, 0.2-50%, 0.5-25%, or 1-10%.

[0155] Preferably, HLA-PEPTIDE targets are not generally expressed in most normal tissues. For example, the HLA-PEPTIDE targets may in some cases not be expressed in tissues in the Genotype-Tissue Expression (GTEx) Project, or may in some cases be expressed only in immune privileged or non-essential tissues. Exemplary immune privileged or non-essential tissues include testis, minor salivary glands, the endocervix, and the thyroid. In some cases, an HLA-PEPTIDE target may be deemed to not be expressed on essential tissues or non-immune privileged tissues if the median expression of a gene from which the restricted peptide is derived is less than 0.5 RPKM (Reads Per Kilobase of transcript per Million napped reads) across GTEx samples, if the gene is not expressed with greater than 10 RPKM across GTEX samples, if the gene was expressed at >=5 RPKM in no more two samples across all essential tissue samples, or any combination thereof.

[0156] Exemplary HLA Class I Subtypes of the HLA-PEPTIDE Targets

[0157] In humans, there are many MHC haplotypes (referred to interchangeably herein as MHC subtypes, HLA subtypes, MHC types, and HLA types). Exemplary HLA subtypes include, by way of example only, HLA-A2, HLA-A1, HLA-A3, HLA-A11, HLA-A23, HLA-A24, HLA-A25, HLA-A26, HLA-A28, HLA-A29, HLA-A30, HLA-A31, HLA-A32, HLA-A33, HLA-A34, HLA-68, HLA-B7, HLA-B8, HLA-B40, HLA-B44, HLA-B13, HLA-B15, HLA-B-18, HLA-B27, HLA-B35, HLA-B37, HLA-B38, HLA-B39, HLA-B45, HLA-B46, HLA-B49, HLA-B51, HLA-B54, HLA-B55, HLA-B56, HLA-B57, HLA-B58, HLA-C*01, HLA-C*02, HLA-C*03, HLA-C*04, HLA-C*05, HLA-C*06, HLA-C*07, HLA-C*12, HLA-C*14, HLA-C*16, HLA-Cw8, and all 4 digit and 6 digit subtypes thereof. As is known to those skilled in the art there are allelic variants of the above HLA types, all of which are encompassed by the present invention. A full list of HLA Class Alleles can be found on http://hla.alleles.org/alleles/. For example, a full list of HLA Class I Alleles can be found on http://hla.alleles.org/alleles/class1.html.

[0158] HLA-Restricted Peptides

[0159] The HLA-restricted peptides (referred to interchangeably herein) as “restricted peptides” can be peptide fragments of tumor-specific genes, e.g., cancer-specific genes. Preferably, the cancer-specific genes are expressed in cancer samples. Genes which are aberrantly expressed in cancer samples can be identified through a database. Exemplary databases include, by way of example only, The Cancer Genome Atlas (TCGA) Research Network: http://cancergenome.nih.gov/; the International Cancer Genome Consortium: https://dcc.icgc.org/. In some embodiments, the cancer-specific gene has an observed expression of at least 10 RPKM in at least 5 samples from the TCGA database. The cancer-specific gene may have an observable bimodal distribution

[0160] The cancer-specific gene may have an observed expression of greater than 10, 20, 30, 40, 50, 60, 70, 80, 90, or 100 TPM in at least one TCGA tumor tissue. In preferred embodiments, the cancer-specific gene has an observed expression of greater than 100 TPM in at least one TCGA tumor tissue. In some cases, the cancer specific gene has an observed bimodal distribution of expression across TCGA samples. Without wishing to be bound by theory, such bimodal expression pattern is consistent with a biological model in which there is minimal expression at baseline in all tumor samples and higher expression in a subset of tumors experiencing epigenetic dysregulation.

[0161] Preferably, the cancer-specific gene is not generally expressed in most normal tissues. For example, the cancer-specific gene may in some cases not be expressed in tissues in the Genotype-Tissue Expression (GTEx) Project, or may in some cases be expressed in immune privileged or non-essential tissues. Exemplary immune privileged or non-essential tissues include testis, minor salivary glands, the endocervix, and thyroid. In some cases, an cancer-specific gene may be deemed to not be expressed an essential tissues or non-immune privileged tissue if the median expression of the cancer-specific gene is less than 0.5 RPKM (Reads Per Kilobase of transcript per Million napped reads) across GTEx samples, if the gene is not expressed with greater than 10 RPKM across GTEX samples, if the gene was expressed at >=5 RPKM in no more two samples across all essential tissue samples, or any combination thereof.

[0162] In some embodiments, the cancer-specific gene meets the following criteria by assessment of the GTEx: (1) median GTEx expression in brain, heart, or lung is less than 0.1 transcripts per million (TPM), with no one sample exceeding 5 TPM, (2) median GTEx expression in other essential organs (excluding testis, thyroid, minor salivary gland) is less than 2 TPM with no one sample exceeding 10 TPM.

[0163] In some embodiments, the cancer-specific gene is not likely expressed in immune cells generally, e.g., is not an interferon family gene, is not an eye-related gene, not an olfactory or taste receptor gene, and is not a gene related to the circadian cycle (e.g., not a CLOCK, PERIOD, CRY gene)

[0164] The restricted peptide preferably may be presented on the surface of a tumor.

[0165] The restricted peptides may have a size of about 5, about 6, about 7, about 8, about 9, about 10, about 11, about 12, about 13, about 14, or about 15 amino molecule residues, and any range derivable therein. In particular embodiments, the restricted peptide has a size of about 8, about 9, about 10, about 11, or about 12 amino molecule residues. The restricted peptide may be about 5-15 amino acids in length, preferably may be about 7-12 amino acids in length, or more preferably may be about 8-11 amino acids in length.

[0166] Exemplary HLA-PEPTIDE Targets

[0167] Exemplary HLA-PEPTIDE targets are shown in Table A. In each row of Table A the HLA allele and corresponding HLA-restricted peptide sequence of each complex is shown. The peptide sequence can consist of the respective sequence shown in each row of Table A. Alternatively the peptide sequence can comprise the respective sequence shown in each row of Table A. Alternatively the peptide sequence can consist essentially of the respective sequence shown in each row of Table A.

[0168] In some embodiments, the HLA-PEPTIDE target is a target as shown in Table A.

[0169] In some embodiments, the HLA-PEPTIDE target is a target shown in Table A, with the proviso that the isolated HLA-PEPTIDE target is not any one of Target nos. 6364-6369, 6386-6389, 6500, 6521-6524, or 6578 and is not an HLA-PEPTIDE target found in Table B or Table C.

[0170] In some embodiments, the HLA-restricted peptide is not from a gene selected from WT1 or MART1.

[0171] HLA Class I molecules which do not associate with a restricted peptide ligand are generally unstable. Accordingly, the association of the restricted peptide with the α1/α2 groove of the HLA molecule may stabilize the non-covalent association of the β2-microglobin subunit of the HLA subtype with the α-subunit of the HLA subtype.

[0172] Stability of the non-covalent association of the β2-microglobin subunit of the HLA subtype with the α-subunit of the HLA subtype can be determined using any suitable means. For example, such stability may be assessed by dissolving insoluble aggregates of HLA molecules in high concentrations of urea (e.g., about 8M urea), and determining the ability of the HLA molecule to refold in the presence of the restricted peptide during urea removal, e.g., urea removal by dialysis. Such refolding approaches are described in, e.g., Proc. Natl. Acad. Sci. USA Vol. 89, pp. 3429-3433, April 1992, hereby incorporated by reference.

[0173] For other example, such stability may be assessed using conditional HLA Class I ligands. Conditional HLA Class I ligands are generally designed as short restricted peptides which stabilize the association of the β2 and α subunits of the HLA Class I molecule by binding to the α1/α2 groove of the HLA molecule, and which contain one or more amino acid modifications allowing cleavage of the restricted peptide upon exposure to a conditional stimulus. Upon cleavage of the conditional ligand, the β2 and α-subunits of the HLA molecule dissociate, unless such conditional ligand is exchanged for a restricted peptide which binds to the α1/α2 groove and stabilizes the HLA molecule. Conditional ligands can be designed by introducing amino acid modifications in either known HLA peptide ligands or in predicted high-affinity HLA peptide ligands. For HLA alleles for which structural information is available, water-accessibility of side chains may also be used to select positions for introduction of the amino acid modifications. Use of conditional HLA ligands may be advantageous by allowing the batch preparation of stable HLA-peptide complexes which may be used to interrogate test restricted peptides in a high throughput manner. Conditional HLA Class I ligands, and methods of production, are described in, e.g., Proc Natl Acad Sci USA. 2008 Mar. 11; 105(10): 3831-3836; Proc Natl Acad Sci USA. 2008 Mar. 11; 105(10): 3825-3830; J Exp Med. 2018 May 7; 215(5): 1493-1504; Choo, J. A. L. et al. Bioorthogonal cleavage and exchange of major histocompatibility complex ligands by employing azobenzene-containing peptides. Angew Chem Int Ed Engl 53, 13390-13394 (2014); Amore, A. et al. Development of a Hypersensitive Periodate-Cleavable Amino Acid that is Methionine- and Disulfide-Compatible and its Application in MHC Exchange Reagents for T Cell Characterisation. ChemBioChem 14, 123-131 (2012); Rodenko, B. et al. Class I Major Histocompatibility Complexes Loaded by a Periodate Trigger. J Am Chem Soc 131, 12305-12313 (2009); and Chang, C. X. L. et al. Conditional ligands for Asian HLA variants facilitate the definition of CD8+ T-cell responses in acute and chronic viral diseases. Eur J Immunol 43, 1109-1120 (2013). These references are incorporated by reference in their entirety.

[0174] Accordingly, in some embodiments, the ability of an HLA-restricted peptide described herein, e.g., described in Table A, to stabilize the association of the β2- and α-subunits of the HLA molecule, is assessed by performing a conditional ligand mediated-exchange reaction and assay for HLA stability. HLA stability can be assayed using any suitable method, including, e.g., mass spectrometry analysis, immunoassays (e.g., ELISA), size exclusion chromatography, and HLA multimer staining followed by flow cytometry assessment of T cells.

[0175] Other exemplary methods for assessing stability of the non-covalent association of the β2-microglobin subunit of the HLA subtype with the α-subunit of the HLA subtype include peptide exchange using dipeptides. Peptide exchange using dipeptides has been described in, e.g., Proc Natl Acad Sci USA. 2013 Sep. 17, 110(38): 15383-8; Proc Natl Acad Sci USA. 2015 Jan. 6, 112(1):202-7, which is hereby incorporated by reference.

[0176] Provided herein are useful antigens comprising an HLA-PEPTIDE target. The HLA-PEPTIDE targets may comprise a specific HLA-restricted peptide having a defined amino acid sequence complexed with a specific HLA subtype allele.

[0177] The HLA-PEPTIDE target may be isolated and/or in substantially pure form. For example, the HLA-PEPTIDE targets may be isolated from their natural environment, or may be produced by means of a technical process. In some cases, the HLA-PEPTIDE target is provided in a form which is substantially free of other peptides or proteins.

[0178] THE HLA-PEPTIDE targets may be presented in soluble form, and optionally may be a recombinant HLA-PEPTIDE target complex. The skilled artisan may use any suitable method for producing and purifying recombinant HLA-PEPTIDE targets. Suitable methods include, e.g., use of E. coli expression systems, insect cells, and the like. Other methods include synthetic production, e.g., using cell free systems. An exemplary suitable cell free system is described in WO2017089756, which is hereby incorporated by reference in its entirety.

[0179] Also provided herein are compositions comprising an HLA-PEPTIDE target.

[0180] In some cases, the composition comprises an HLA-PEPTIDE target attached to a solid support. Exemplary solid supports include, but are not limited to, beads, wells, membranes, tubes, columns, plates, sepharose, magnetic beads, and chips. Exemplary solid supports are described in, e.g., Catalysts 2018, 8, 92; doi:10.3390/catal8020092, which is hereby incorporated by reference in its entirety.

[0181] The HLA-PEPTIDE target may be attached to the solid support by any suitable methods known in the art. In some cases, the HLA-PEPTIDE target is covalently attached to the solid support.

[0182] In some cases, the HLA-PEPTIDE target is attached to the solid support by way of an affinity binding pair. Affinity binding pairs generally involved specific interactions between two molecules. A ligand having an affinity for its binding partner molecule can be covalently attached to the solid support, and thus used as bait for immobilizing Common affinity binding pairs include, e.g., streptavidin and biotin, avidin and biotin; polyhistidine tags with metal ions such as copper, nickel, zinc, and cobalt; and the like.

[0183] The HLA-PEPTIDE target may comprise a detectable label.

[0184] Pharmaceutical compositions comprising HLA-PEPTIDE targets.

[0185] The composition comprising an HLA-PEPTIDE target may be a pharmaceutical composition. Such a composition may comprise multiple HLA-PEPTIDE targets. Exemplary pharmaceutical compositions are described herein. The composition may be capable of eliciting an immune response. The composition may comprise an adjuvant. Suitable adjuvants include, but are not limited to 1018 ISS, alum, aluminium salts, Amplivax, AS15, BCG, CP-870,893, CpG7909, CyaA, dSLIM, GM-CSF, IC30, IC31, Imiquimod, ImuFact IMP321, IS Patch, ISS, ISCOMATRIX, JuvImmune, LipoVac, MF59, monophosphoryl lipid A, Montanide IMS 1312, Montanide ISA 206, Montanide ISA 50V, Montanide ISA-51, OK-432, OM-174, OM-197-MP-EC, ONTAK, PepTel vector system, PLG microparticles, resiquimod, SRL172, Virosomes and other Virus-like particles, YF-17D, VEGF trap, R848, beta-glucan, Pam3Cys, Aquila's QS21 stimulon (Aquila Biotech, Worcester, Mass., USA) which is derived from saponin, mycobacterial extracts and synthetic bacterial cell wall mimics, and other proprietary adjuvants such as Ribi's Detox. Quil or Superfos. Adjuvants such as incomplete Freund's or GM-CSF are useful. Several immunological adjuvants (e.g., MF59) specific for dendritic cells and their preparation have been described previously (Dupuis M, et al., Cell Immunol. 1998; 186(1):18-27; Allison A C; Dev Biol Stand. 1998; 92:3-11). Also cytokines can be used. Several cytokines have been directly linked to influencing dendritic cell migration to lymphoid tissues (e.g., TNF-alpha), accelerating the maturation of dendritic cells into efficient antigen-presenting cells for T-lymphocytes (e.g., GM-CSF, IL-1 and IL-4) (U.S. Pat. No. 5,849,589, specifically incorporated herein by reference in its entirety) and acting as immunoadjuvants (e.g., IL-12) (Gabrilovich D I, et al., J Immunother Emphasis Tumor Immunol. 1996 (6):414-418).

[0186] HLA-Peptide ABPs

[0187] Also provided herein are ABPs that specifically bind to HLA-PEPTIDE target as disclosed herein.

[0188] The HLA-PEPTIDE target may be expressed on the surface of any suitable target cell including a tumor cell.

[0189] The ABP can specifically bind to a human leukocyte antigen (HLA)-PEPTIDE target, wherein the HLA-PEPTIDE target comprises an HLA-restricted peptide complexed with an HLA Class I molecule, wherein the HLA-restricted peptide is located in the peptide binding groove of an α1/α2 heterodimer portion of the HLA Class I molecule.

[0190] In some aspects, the ABP does not bind HLA class I in the absence of HLA-restricted peptide. In some aspects, the ABP does not bind HLA-restricted peptide in the absence of human MHC class I. In some aspects, the ABP binds tumor cells presenting human MHC class I being complexed with HLA—restricted peptide, optionally wherein the HLA restricted peptide is a tumor antigen characterizing the cancer.

[0191] An ABP can bind to each portion of an HLA-PEPTIDE complex (i.e., HLA and peptide representing each portion of the complex), which when bound together form a novel target and protein surface for interaction with and binding by the ABP, distinct from a surface presented by the peptide alone or HLA subtype alone. Generally the novel target and protein surface formed by binding of HLA to peptide does not exist in the absence of each portion of the HLA-PEPTIDE complex.

[0192] An ABP can be capable of specifically binding a complex comprising HLA and an HLA-restricted peptide (HLA-PEPTIDE), e.g., derived from a tumor. In some aspects, the ABP does not bind HLA in an absence of the HLA-restricted peptide derived from the tumor. In some aspects, the ABP does not bind the HLA-restricted peptide derived from the tumor in an absence of HLA. In some aspects, the ABP binds a complex comprising HLA and HLA-restricted peptide when naturally presented on a cell such as a tumor cell.

[0193] In some embodiments, an ABP provided herein modulates binding of HLA-PEPTIDE to one or more ligands of HLA-PEPTIDE.

[0194] The ABP may specifically bind to any one of the HLA-PEPTIDE targets as disclosed in Table A. In some embodiments, the ABP specifically binds to a HLA-PEPTIDE target which is a target shown in Table A, with the proviso that the isolated HLA-PEPTIDE target is not any one of Target nos. 6364-6369, 6386-6389, 6500, 6521-6524, or 6578 and is not an HLA-PEPTIDE target found in Table B or Table C. In some embodiments, the HLA-restricted peptide is not from a gene selected from WT1 or MART1.

[0195] In more particular embodiments, the ABP specifically binds to an HLA-PEPTIDE target selected from any one of HLA subtype A*02:01 complexed with an HLA-restricted peptide comprising the sequence LLASSILCA, HLA subtype A*01:01 complexed with an HLA-restricted peptide comprising the sequence EVDPIGHLY, HLA subtype B*44:02 complexed with an HLA-restricted peptide comprising the sequence GEMSSNSTAL, HLA subtype A*02:01 complexed with an HLA-restricted peptide comprising the sequence GVYDGEEHSV, HLA subtype *01:01 complexed with an HLA-restricted peptide comprising the sequence EVDPIGHVY, and HLA subtype HLA-A*01:01 complexed with an HLA-restricted peptide comprising the sequence NTDNNLAVY.

[0196] In some embodiments, an ABP is an ABP that competes with an illustrative ABP provided herein. In some aspects, the ABP that competes with the illustrative ABP provided herein binds the same epitope as an illustrative ABP provided herein.

[0197] In some embodiments, the ABPs described herein are referred to herein as “variants.” In some embodiments, such variants are derived from a sequence provided herein, for example, by affinity maturation, site directed mutagenesis, random mutagenesis, or any other method known in the art or described herein. In some embodiments, such variants are not derived from a sequence provided herein and may, for example, be isolated de novo according to the methods provided herein for obtaining ABPs. In some embodiments, a variant is derived from any of the sequences provided herein, wherein one or more conservative amino acid substitutions are made. In some embodiments, a variant is derived from any of the sequences provided herein, wherein one or more nonconservative amino acid substitutions are made. Conservative amino acid substitutions are described herein. Exemplary nonconservative amino acid substitutions include those described in J Immunol. 2008 May 1; 180(9):6116-31, which is hereby incorporated by reference in its entirety. In preferred embodiments, the non-conservative amino acid substitution does not interfere with or inhibit the biological activity of the functional variant. In yet more preferred embodiments, the non-conservative amino acid substitution enhances the biological activity of the functional variant, such that the biological activity of the functional variant is increased as compared to the parent ABP.

[0198] ABPs Comprising an Antibody or Antigen-Binding Fragment Thereof

[0199] An ABP may comprise an antibody or antigen-binding fragment thereof.

[0200] In some embodiments, the ABPs provided herein comprise a light chain. In some aspects, the light chain is a kappa light chain. In some aspects, the light chain is a lambda light chain.

[0201] In some embodiments, the ABPs provided herein comprise a heavy chain. In some aspects, the heavy chain is an IgA. In some aspects, the heavy chain is an IgD. In some aspects, the heavy chain is an IgE. In some aspects, the heavy chain is an IgG In some aspects, the heavy chain is an IgM. In some aspects, the heavy chain is an IgG1. In some aspects, the heavy chain is an IgG2. In some aspects, the heavy chain is an IgG3. In some aspects, the heavy chain is an IgG4. In some aspects, the heavy chain is an IgA1. In some aspects, the heavy chain is an IgA2.

[0202] In some embodiments, the ABPs provided herein comprise an antibody fragment. In some embodiments, the ABPs provided herein consist of an antibody fragment. In some embodiments, the ABPs provided herein consist essentially of an antibody fragment. In some aspects, the ABP fragment is an Fv fragment. In some aspects, the ABP fragment is a Fab fragment. In some aspects, the ABP fragment is a F(ab′)₂ fragment. In some aspects, the ABP fragment is a Fab′ fragment. In some aspects, the ABP fragment is an scFv (sFv) fragment. In some aspects, the ABP fragment is an scFv-Fc fragment. In some aspects, the ABP fragment is a fragment of a single domain ABP.

[0203] In some embodiments, an ABP fragment provided herein is derived from an illustrative ABP provided herein. In some embodiments, an ABP fragments provided herein is not derived from an illustrative ABP provided herein and may, for example, be isolated de novo according to the methods provided herein for obtaining ABP fragments.

[0204] In some embodiments, an ABP fragment provided herein retains the ability to bind the HLA-PEPTIDE target, as measured by one or more assays or biological effects described herein. In some embodiments, an ABP fragment provided herein retains the ability to prevent HLA-PEPTIDE from interacting with one or more of its ligands, as described herein.

[0205] In some embodiments, the ABPs provided herein are monoclonal ABPs. In some embodiments, the ABPs provided herein are polyclonal ABPs.

[0206] In some embodiments, the ABPs provided herein comprise a chimeric ABP. In some embodiments, the ABPs provided herein consist of a chimeric ABP In some embodiments, the ABPs provided herein consist essentially of a chimeric ABP. In some embodiments, the ABPs provided herein comprise a humanized ABP. In some embodiments, the ABPs provided herein consist of a humanized ABP. In some embodiments, the ABPs provided herein consist essentially of a humanized ABP. In some embodiments, the ABPs provided herein comprise a human ABP. In some embodiments, the ABPs provided herein consist of a human ABP In some embodiments, the ABPs provided herein consist essentially of a human ABP.

[0207] In some embodiments, the ABPs provided herein comprise an alternative scaffold. In some embodiments, the ABPs provided herein consist of an alternative scaffold. In some embodiments, the ABPs provided herein consist essentially of an alternative scaffold. Any suitable alternative scaffold may be used. In some aspects, the alternative scaffold is selected from an Adnectin™, an iMab, an Anticalin®, an EETI-II/AGRP, a Kunitz domain, a thioredoxin peptide aptamer, an Affibody®, a DARPin, an Affilin, a Tetranectin, a Fynomer, and an Avimer.

[0208] Also disclosed herein is an isolated humanized, human, or chimeric ABP that competes for binding to an HLA-PEPTIDE with an ABP disclosed herein.

[0209] Also disclosed herein is an isolated humanized, human, or chimeric ABP that binds an HLA-PEPTIDE epitope bound by an ABP disclosed herein.

[0210] In certain aspects, an ABP comprises a human Fc region comprising at least one modification that reduces binding to a human Fc receptor.

[0211] It is known that when an ABP is expressed in cells, the ABP is modified after translation. Examples of the posttranslational modification include cleavage of lysine at the C terminus of the heavy chain by a carboxypeptidase; modification of glutamine or glutamic acid at the N terminus of the heavy chain and the light chain to pyroglutamic acid by pyroglutamylation; glycosylation; oxidation; deamidation; and glycation, and it is known that such posttranslational modifications occur in various ABPs (See Journal of Pharmaceutical Sciences, 2008, Vol. 97, p. 2426-2447, incorporated by reference in its entirety). In some embodiments, an ABP is an ABP or antigen-binding fragment thereof which has undergone posttranslational modification. Examples of an ABP or antigen-binding fragment thereof which have undergone posttranslational modification include an ABP or antigen-binding fragments thereof which have undergone pyroglutamylation at the N terminus of the heavy chain variable region and/or deletion of lysine at the C terminus of the heavy chain. It is known in the art that such posttranslational modification due to pyroglutamylation at the N terminus and deletion of lysine at the C terminus does not have any influence on the activity of the ABP or fragment thereof (Analytical Biochemistry, 2006, Vol. 348, p. 24-39, incorporated by reference in its entirety).

### Monospecific and Multispecific HLA-PEPTIDE ABPs

[0212] In some embodiments, the ABPs provided herein are monospecific ABPs.

[0213] In some embodiments, the ABPs provided herein are multispecific ABPs.

[0214] In some embodiments, a multispecific ABP provided herein binds more than one antigen. In some embodiments, a multispecific ABP binds 2 antigens. In some embodiments, a multispecific ABP binds 3 antigens. In some embodiments, a multispecific ABP binds 4 antigens. In some embodiments, a multispecific ABP binds 5 antigens.

[0215] In some embodiments, a multispecific ABP provided herein binds more than one epitope on a HLA-PEPTIDE antigen. In some embodiments, a multispecific ABP binds 2 epitopes on a HLA-PEPTIDE antigen. In some embodiments, a multispecific ABP binds 3 epitopes on a HLA-PEPTIDE antigen.

[0216] Many multispecific ABP constructs are known in the art, and the ABPs provided herein may be provided in the form of any suitable multispecific suitable construct.

[0217] In some embodiments, the multispecific ABP comprises an immunoglobulin comprising at least two different heavy chain variable regions each paired with a common light chain variable region (i.e., a “common light chain ABP”). The common light chain variable region forms a distinct antigen-binding domain with each of the two different heavy chain variable regions. See Merchant et al., Nature Biotechnol., 1998, 16:677-681, incorporated by reference in its entirety.

[0218] In some embodiments, the multispecific ABP comprises an immunoglobulin comprising an ABP or fragment thereof attached to one or more of the N- or C-termini of the heavy or light chains of such immunoglobulin. See Coloma and Morrison, Nature Biotechnol., 1997, 15:159-163, incorporated by reference in its entirety. In some aspects, such ABP comprises a tetravalent bispecific ABP.

[0219] In some embodiments, the multispecific ABP comprises a hybrid immunoglobulin comprising at least two different heavy chain variable regions and at least two different light chain variable regions. See Milstein and Cuello, Nature, 1983, 305:537-540; and Staerz and Bevan, Proc. Natl. Acad. Sci. USA, 1986, 83:1453-1457; each of which is incorporated by reference in its entirety.

[0220] In some embodiments, the multispecific ABP comprises immunoglobulin chains with alterations to reduce the formation of side products that do not have multispecificity. In some aspects, the ABPs comprise one or more “knobs-into-holes” modifications as described in U.S. Pat. No. 5,731,168, incorporated by reference in its entirety.

[0221] In some embodiments, the multispecific ABP comprises immunoglobulin chains with one or more electrostatic modifications to promote the assembly of Fc hetero-multimers. See WO 2009/089004, incorporated by reference in its entirety.

[0222] In some embodiments, the multispecific ABP comprises a bispecific single chain molecule. See Traunecker et al., EMBO J., 1991, 10:3655-3659; and Gruber et al., J. Immunol., 1994, 152:5368-5374; each of which is incorporated by reference in its entirety.

[0223] In some embodiments, the multispecific ABP comprises a heavy chain variable domain and a light chain variable domain connected by a polypeptide linker, where the length of the linker is selected to promote assembly of multispecific ABP with the desired multispecificity. For example, monospecific scFvs generally form when a heavy chain variable domain and light chain variable domain are connected by a polypeptide linker of more than 12 amino acid residues. See U.S. Pat. Nos. 4,946,778 and 5,132,405, each of which is incorporated by reference in its entirety. In some embodiments, reduction of the polypeptide linker length to less than 12 amino acid residues prevents pairing of heavy and light chain variable domains on the same polypeptide chain, thereby allowing pairing of heavy and light chain variable domains from one chain with the complementary domains on another chain. The resulting ABP therefore has multispecificity, with the specificity of each binding site contributed by more than one polypeptide chain. Polypeptide chains comprising heavy and light chain variable domains that are joined by linkers between 3 and 12 amino acid residues form predominantly dimers (termed diabodies). With linkers between 0 and 2 amino acid residues, trimers (termed triabodies) and tetramers (termed tetrabodies) are favored. However, the exact type of oligomerization appears to depend on the amino acid residue composition and the order of the variable domain in each polypeptide chain (e.g., V_{H}-linker-V_{L} vs. V_{L}-linker-V_{H}), in addition to the linker length. A skilled person can select the appropriate linker length based on the desired multispecificity.

### Fc Region and Variants

[0224] In certain embodiments, an ABP provided herein comprises an Fc region. An Fc region can be wild-type or a variant thereof. In certain embodiments, an ABP provided herein comprises an Fc region with one or more amino acid substitutions, insertions, or deletions in comparison to a naturally occurring Fc region. In some aspects, such substitutions, insertions, or deletions yield ABP with altered stability, glycosylation, or other characteristics. In some aspects, such substitutions, insertions, or deletions yield a glycosylated ABP.

[0225] A “variant Fc region” or “engineered Fc region” comprises an amino acid sequence that differs from that of a native-sequence Fc region by virtue of at least one amino acid modification, preferably one or more amino acid substitution(s). Preferably, the variant Fc region has at least one amino acid substitution compared to a native-sequence Fc region or to the Fc region of a parent polypeptide, e.g., from about one to about ten amino acid substitutions, and preferably from about one to about five amino acid substitutions in a native-sequence Fc region or in the Fc region of the parent polypeptide. The variant Fc region herein will preferably possess at least about 80% homology with a native-sequence Fc region and/or with an Fc region of a parent polypeptide, and most preferably at least about 90% homology therewith, more preferably at least about 95% homology therewith.

[0226] The term “Fc-region-comprising ABP” refers to an ABP that comprises an Fc region. The C-terminal lysine (residue 447 according to the EU numbering system) of the Fc region may be removed, for example, during purification of the ABP or by recombinant engineering the nucleic acid encoding the ABP. Accordingly, an ABP having an Fc region can comprise an ABP with or without K447.

[0227] In some aspects, the Fc region of an ABP provided herein is modified to yield an ABP with altered affinity for an Fc receptor, or an ABP that is more immunologically inert. In some embodiments, the ABP variants provided herein possess some, but not all, effector functions. Such ABPs may be useful, for example, when the half-life of the ABP is important in vivo, but when certain effector functions (e.g., complement activation and ADCC) are unnecessary or deleterious.

[0228] In some embodiments, the Fc region of an ABP provided herein is a human IgG4 Fc region comprising one or more of the hinge stabilizing mutations S228P and L235E. See Aalberse et al., Immunology, 2002, 105:9-19, incorporated by reference in its entirety. In some embodiments, the IgG4 Fc region comprises one or more of the following mutations: E233P, F234V, and L235A. See Armour et al., Mol. Immunol., 2003, 40:585-593, incorporated by reference in its entirety. In some embodiments, the IgG4 Fc region comprises a deletion at position G236.

[0229] In some embodiments, the Fc region of an ABP provided herein is a human IgG1 Fc region comprising one or more mutations to reduce Fc receptor binding. In some aspects, the one or more mutations are in residues selected from S228 (e.g., S228A), L234 (e.g., L234A), L235 (e.g., L235A), D265 (e.g., D265A), and N297 (e.g., N297A). In some aspects, the ABP comprises a PVA236 mutation. PVA236 means that the amino acid sequence ELLG from amino acid position 233 to 236 of IgG1 or EFLG of IgG4, is replaced by PVA. See U.S. Pat. No. 9,150,641, incorporated by reference in its entirety.

[0230] In some embodiments, the Fc region of an ABP provided herein is modified as described in Armour et al., Eur. J. Immunol., 1999, 29:2613-2624; WO 1999/058572; and/or U.K. Pat. App. No. 98099518; each of which is incorporated by reference in its entirety.

[0231] In some embodiments, the Fc region of an ABP provided herein is a human IgG2 Fc region comprising one or more of mutations A330S and P331S.

[0232] In some embodiments, the Fc region of an ABP provided herein has an amino acid substitution at one or more positions selected from 238, 265, 269, 270, 297, 327 and 329. See U.S. Pat. No. 6,737,056, incorporated by reference in its entirety. Such Fc mutants include Fc mutants with substitutions at two or more of amino acid positions 265, 269, 270, 297 and 327, including the so-called “DANA” Fc mutant with substitution of residues 265 and 297 with alanine. See U.S. Pat. No. 7,332,581, incorporated by reference in its entirety. In some embodiments, the ABP comprises an alanine at amino acid position 265. In some embodiments, the ABP comprises an alanine at amino acid position 297.

[0233] In certain embodiments, an ABP provided herein comprises an Fc region with one or more amino acid substitutions which improve ADCC, such as a substitution at one or more of positions 298, 333, and 334 of the Fc region. In some embodiments, an ABP provided herein comprises an Fc region with one or more amino acid substitutions at positions 239, 332, and 330, as described in Lazar et al., Proc. Natl. Acad. Sci. USA, 2006, 103:4005-4010, incorporated by reference in its entirety.

[0234] In some embodiments, an ABP provided herein comprises one or more alterations that improves or diminishes C1q binding and/or CDC. See U.S. Pat. No. 6,194,551; WO 99/51642; and Idusogie et al., J. Immunol., 2000, 164:4178-4184; each of which is incorporated by reference in its entirety.

[0235] In some embodiments, an ABP provided herein comprises one or more alterations to increase half-life. ABPs with increased half-lives and improved binding to the neonatal Fc receptor (FcRn) are described, for example, in Hinton et al., J. Immunol., 2006, 176:346-356; and U.S. Pat. Pub. No. 2005/0014934; each of which is incorporated by reference in its entirety. Such Fc variants include those with substitutions at one or more of Fc region residues: 238, 250, 256, 265, 272, 286, 303, 305, 307, 311, 312, 314, 317, 340, 356, 360, 362, 376, 378, 380, 382, 413, 424, 428, and 434 of an IgG

[0236] In some embodiments, an ABP provided herein comprises one or more Fc region variants as described in U.S. Pat. Nos. 7,371,826 5,648,260, and 5,624,821; Duncan and Winter, Nature, 1988, 322:738-740; and WO 94/29351; each of which is incorporated by reference in its entirety.

[0237] Antibodies Specific for A*02:01_LLASSILCA (G7)

[0238] In some aspects, provided herein are ABPs comprising antibodies or antigen-binding fragments thereof that specifically bind an HLA-PEPTIDE target, wherein the HLA Class I molecule of the HLA-PEPTIDE target is HLA subtype A*02:01 and the HLA-restricted peptide of the HLA-PEPTIDE target comprises the sequence LLASSILCA (SEQ ID NO: 2737) (“G7”).

[0239] Sequences of G7-Specific Antibodies

[0240] The ABP specific for A*02:01_LLASSILCA (SEQ ID NO: 2737) may comprise one or more sequences, as described in further detail.

[0241] CDRs

[0242] The ABP specific for A*02:01_LLASSILCA (SEQ ID NO: 2737) may comprise one or more antibody complementarity determining region (CDR) sequences, e.g., may comprise three heavy chain CDRs (CDR-H1, CDR-H2, CDR-H3) and three light chain CDRs (CDR-L1, CDR-L2, CDR-L3). The ABP specific for A*02:01_LLASSILCA (SEQ ID NO: 2737) may comprise a particular heavy chain CDR3 (CDR-H3) sequence and a particular light chain CDR3 (CDR-L3) sequence. In some embodiments, the CDR-H3 is SEQ ID NO: 3030 and the CDR-L3 is SEQ ID NO: 3048. In some embodiments, the CDR-H3 is SEQ ID NO: 3025 and the CDR-L3 is SEQ ID NO: 3043. In some embodiments, the CDR-H3 is SEQ ID NO: 3026 and the CDR-L3 is SEQ ID NO: 3044. In some embodiments, the CDR-H3 is SEQ ID NO: 3027 and the CDR-L3 is SEQ ID NO: 3045. In some embodiments, the CDR-H3 is SEQ ID NO: 3028 and the CDR-L3 is SEQ ID NO: 3046. In some embodiments, the CDR-H3 is SEQ ID NO: 3029 and the CDR-L3 is SEQ ID NO: 3047. In some embodiments, the CDR-H3 is SEQ ID NO: 3031 and the CDR-L3 is SEQ ID NO: 3049. In some embodiments, the CDR-H3 is SEQ ID NO: 3032 and the CDR-L3 is SEQ ID NO: 3050.

[0243] The ABP specific for A*02:01_LLASSILCA (SEQ ID NO: 2737) may comprise a CDR-H1 that is SEQ ID NO: 3010, a CDR-H2 that is SEQ ID NO: 3017, a CDR-H3 that is SEQ ID NO: 3025, a CDR-L1 that is SEQ ID NO: 3033, a CDR-L2 that is SEQ ID NO: 2970, and a CDR-L3 that is SEQ ID NO: 3043. The ABP specific for A*02:01_LLASSILCA (SEQ ID NO: 2737) may comprise a CDR-H1 that is SEQ ID NO: 3011, a CDR-H2 that is SEQ ID NO: 3018, a CDR-H3 that is SEQ ID NO: 3026, a CDR-L1 that is SEQ ID NO: 3034, a CDR-L2 that is SEQ ID NO: 2958, and a CDR-L3 that is SEQ ID NO: 3044. The ABP specific for A*02:01_LLASSILCA (SEQ ID NO: 2737) may comprise a CDR-H1 that is SEQ ID NO: 3012, a CDR-H2 that is SEQ ID NO: 3019, a CDR-H3 that is SEQ ID NO: 3027, a CDR-L1 that is SEQ ID NO: 3035, a CDR-L2 that is SEQ ID NO: 3039, and a CDR-L3 that is SEQ ID NO: 3045. The ABP specific for A*02:01_LLASSILCA (SEQ ID NO: 2737) may comprise a CDR-H1 that is SEQ ID NO: 3013, a CDR-H2 that is SEQ ID NO: 3020, a CDR-H3 that is SEQ ID NO: 3028, a CDR-L1 that is SEQ ID NO: 3036, a CDR-L2 that is SEQ ID NO: 2962, and a CDR-L3 that is SEQ ID NO: 3046. The ABP specific for A*02:01_LLASSILCA (SEQ ID NO: 2737) may comprise a CDR-H1 that is SEQ ID NO: 2879, a CDR-H2 that is SEQ ID NO: 3021, a CDR-H3 that is SEQ ID NO: 3029, a CDR-L1 that is SEQ ID NO: 2934, a CDR-L2 that is SEQ ID NO: 3040, and a CDR-L3 that is SEQ ID NO: 3047. The ABP specific for A*02:01_LLASSILCA (SEQ ID NO: 2737) may comprise a CDR-H1 that is SEQ ID NO: 3014, a CDR-H2 that is SEQ ID NO: 3022, a CDR-H3 that is SEQ ID NO: 3030, a CDR-L1 that is SEQ ID NO: 3037, a CDR-L2 that is SEQ ID NO: 3041, and a CDR-L3 that is SEQ ID NO: 3048. The ABP specific for A*02:01_LLASSILCA (SEQ ID NO: 2737) may comprise a CDR-H1 that is SEQ ID NO: 3015, a CDR-H2 that is SEQ ID NO: 3023, a CDR-H3 that is SEQ ID NO: 3031, a CDR-L1 that is SEQ ID NO: 2946, a CDR-L2 that is SEQ ID NO: 3042, and a CDR-L3 that is SEQ ID NO: 3049. The ABP specific for A*02:01_LLASSILCA (SEQ ID NO: 2737) may comprise a CDR-H1 that is SEQ ID NO: 3016, a CDR-H2 that is SEQ ID NO: 3024, a CDR-H3 that is SEQ ID NO: 3032, a CDR-L1 that is SEQ ID NO: 3038, a CDR-L2 that is SEQ ID NO: 3041, and a CDR-L3 that is SEQ ID NO: 3050.

[0244] VL

[0245] The ABP specific for *02:01_LLASSILCA (SEQ ID NO: 2737) may comprise a VL sequence. The VL sequence may be SEQ ID NO: 3002. The VL sequence may be SEQ ID NO: 3003. The VL sequence may be SEQ ID NO: 3004. The VL sequence may be SEQ ID NO: 3005. The VL sequence may be SEQ ID NO: 3006. The VL sequence may be SEQ ID NO: 3007. The VL sequence may be SEQ ID NO: 3008. The VL sequence may be SEQ ID NO: 3009.

[0246] VH

[0247] The ABP specific for *02:01_LLASSILCA (SEQ ID NO: 2737) may comprise a VH sequence. The VH sequence may be SEQ ID NO: 2994. The VH sequence may be SEQ ID NO: 2995. The VH sequence may be SEQ ID NO: 2996. The VH sequence may be SEQ ID NO: 2997. The VH sequence may be SEQ ID NO: 2998. The VH sequence may be SEQ ID NO: 2999. The VH sequence may be SEQ ID NO: 3000. The VH sequence may be SEQ ID NO: 3001.

[0248] VH-VL Combinations

[0249] The ABP specific for A*02:01_LLASSILCA (SEQ ID NO: 2737) may comprise a VH sequence that is SEQ ID NO: 2994 and a VL sequence that is SEQ ID NO: 3002. The ABP specific for A*02:01_LLASSILCA (SEQ ID NO: 2737) may comprise a VH sequence that is SEQ ID NO: 2995 and a VL sequence that is SEQ ID NO: 3003. The ABP specific for A*02:01_LLASSILCA (SEQ ID NO: 2737) may comprise a VH sequence that is SEQ ID NO: 2996 and a VL sequence that is SEQ ID NO: 3004. The ABP specific for A*02:01 LLASSILCA (SEQ ID NO: 2737) may comprise a VH sequence that is SEQ ID NO: 2997 and a VL sequence that is SEQ ID NO: 3005. The ABP specific for A*02:01_LLASSILCA (SEQ ID NO: 2737) may comprise a VH sequence that is SEQ ID NO: 2998 and a VL sequence that is SEQ ID NO: 3006. The ABP specific for A*02:01_LLASSILCA (SEQ ID NO: 2737) may comprise a VH sequence that is SEQ ID NO: 2999 and a VL sequence that is SEQ ID NO: 3007. The ABP specific for A*02:01_LLASSILCA (SEQ ID NO: 2737) may comprise a VH sequence that is SEQ ID NO: 3000 and a VL sequence that is SEQ ID NO: 3008. The ABP specific for A*02:01_LLASSILCA (SEQ ID NO: 2737) may comprise a VH sequence that is SEQ ID NO: 3001 and a VL sequence that is SEQ ID NO: 3009.

[0250] Antibodies Specific for A*01:01_NTDNNLAVY (G2)

[0251] In some aspects, provided herein are ABPs comprising antibodies or antigen-binding fragments thereof that specifically bind an HLA-PEPTIDE target, wherein the HLA Class I molecule of the HLA-PEPTIDE target is HLA subtype A*01:01 and the HLA-restricted peptide of the HLA-PEPTIDE target comprises the sequence NTDNNLAVY (SEQ ID NO: 23) (“G2”).

[0252] Sequences of G2-Specific Antibodies

[0253] The ABP specific for A*01:01_NTDNNLAVY (SEQ ID NO: 23) may comprise one or more sequences, as described in further detail.

[0254] CDRs

[0255] The ABP specific for A*01:01_NTDNNLAVY (SEQ ID NO: 23) may comprise one or more antibody complementarity determining region (CDR) sequences, e.g., may comprise three heavy chain CDRs (CDR-H1, CDR-H2, CDR-H3) and three light chain CDRs (CDR-L1, CDR-L2, CDR-L3). The ABP specific for A*01:01_NTDNNLAVY (SEQ ID NO: 23) may comprise a particular heavy chain CDR3 (CDR-H3) sequence and a particular light chain CDR3 (CDR-L3) sequence. In some embodiments, the CDR-H3 is SEQ ID NO: 2902 and the CDR-L3 is SEQ ID NO: 2971. In some embodiments, the CDR-H3 is SEQ ID NO: 2903 and the CDR-L3 is SEQ ID NO: 2972. In some embodiments, the CDR-H3 is SEQ ID NO: 2903 and the CDR-L3 is SEQ ID NO: 2973. In some embodiments, the CDR-H3 is SEQ ID NO: 2904 and the CDR-L3 is SEQ ID NO: 2974. In some embodiments, the CDR-H3 is SEQ ID NO: 2905 and the CDR-L3 is SEQ ID NO: 2975. In some embodiments, the CDR-H3 is SEQ ID NO: 2906 and the CDR-L3 is SEQ ID NO: 2976. In some embodiments, the CDR-H3 is SEQ ID NO: 2907 and the CDR-L3 is SEQ ID NO: 2976. In some embodiments, the CDR-H3 is SEQ ID NO: 2908 and the CDR-L3 is SEQ ID NO: 2977. In some embodiments, the CDR-H3 is SEQ ID NO: 2909 and the CDR-L3 is SEQ ID NO: 2972. In some embodiments, the CDR-H3 is SEQ ID NO: 2910 and the CDR-L3 is SEQ ID NO: 2978. In some embodiments, the CDR-H3 is SEQ ID NO: 2911 and the CDR-L3 is SEQ ID NO: 2976. In some embodiments, the CDR-H3 is SEQ ID NO: 2912 and the CDR-L3 is SEQ ID NO: 2978. In some embodiments, the CDR-H3 is SEQ ID NO: 2913 and the CDR-L3 is SEQ ID NO: 2979. In some embodiments, the CDR-H3 is SEQ ID NO: 2914 and the CDR-L3 is SEQ ID NO: 2980. In some embodiments, the CDR-H3 is SEQ ID NO: 2903 and the CDR-L3 is SEQ ID NO: 2981. In some embodiments, the CDR-H3 is SEQ ID NO: 2915 and the CDR-L3 is SEQ ID NO: 2982. In some embodiments, the CDR-H3 is SEQ ID NO: 2916 and the CDR-L3 is SEQ ID NO: 2973. In some embodiments, the CDR-H3 is SEQ ID NO: 2917 and the CDR-L3 is SEQ ID NO: 2972. In some embodiments, the CDR-H3 is SEQ ID NO: 2917 and the CDR-L3 is SEQ ID NO: 2972. In some embodiments, the CDR-H3 is SEQ ID NO: 2918 and the CDR-L3 is SEQ ID NO: 2974. In some embodiments, the CDR-H3 is SEQ ID NO: 2919 and the CDR-L3 is SEQ ID NO: 2983. In some embodiments, the CDR-H3 is SEQ ID NO: 2920 and the CDR-L3 is SEQ ID NO: 2984. In some embodiments, the CDR-H3 is SEQ ID NO: 2921 and the CDR-L3 is SEQ ID NO: 2972. In some embodiments, the CDR-H3 is SEQ ID NO: 2922 and the CDR-L3 is SEQ ID NO: 2985. In some embodiments, the CDR-H3 is SEQ ID NO: 2923 and the CDR-L3 is SEQ ID NO: 2986. In some embodiments, the CDR-H3 is SEQ ID NO: 2924 and the CDR-L3 is SEQ ID NO: 2987. In some embodiments, the CDR-H3 is SEQ ID NO: 2925 and the CDR-L3 is SEQ ID NO: 2973. In some embodiments, the CDR-H3 is SEQ ID NO: 2926 and the CDR-L3 is SEQ ID NO: 2988. In some embodiments, the CDR-H3 is SEQ ID NO: 2927 and the CDR-L3 is SEQ ID NO: 2989. In some embodiments, the CDR-H3 is SEQ ID NO: 2928 and the CDR-L3 is SEQ ID NO: 2981. In some embodiments, the CDR-H3 is SEQ ID NO: 2929 and the CDR-L3 is SEQ ID NO: 2990. In some embodiments, the CDR-H3 is SEQ ID NO: 2930 and the CDR-L3 is SEQ ID NO: 2989. In some embodiments, the CDR-H3 is SEQ ID NO: 2931 and the CDR-L3 is SEQ ID NO: 2991. In some embodiments, the CDR-H3 is SEQ ID NO: 2932 and the CDR-L3 is SEQ ID NO: 2992. In some embodiments, the CDR-H3 is SEQ ID NO: 2933 and the CDR-L3 is SEQ ID NO: 2993.

[0256] The ABP specific for A*01:01_NTDNNLAVY (SEQ ID NO: 23) may comprise a CDR-H1 that is SEQ ID NO: 2851, a CDR-H2 that is SEQ ID NO: 2880, a CDR-H3 that is SEQ ID NO: 2902, a CDR-L1 that is SEQ ID NO: 2934, a CDR-L2 that is SEQ ID NO: 2955, and a CDR-L3 that is SEQ ID NO: 2971. The ABP specific for A*01:01_NTDNNLAVY (SEQ ID NO: 23) may comprise a CDR-H1 that is SEQ ID NO: 2852, a CDR-H2 that is SEQ ID NO: 2881, a CDR-H3 that is SEQ ID NO: 2903, a CDR-L1 that is SEQ ID NO: 2935, a CDR-L2 that is SEQ ID NO: 2956, and a CDR-L3 that is SEQ ID NO: 2972. The ABP specific for A*01:01_NTDNNLAVY (SEQ ID NO: 23) may comprise a CDR-H1 that is SEQ ID NO: 2853, a CDR-H2 that is SEQ ID NO: 2882, a CDR-H3 that is SEQ ID NO: 2903, a CDR-L1 that is SEQ ID NO: 2936, a CDR-L2 that is SEQ ID NO: 2957, and a CDR-L3 that is SEQ ID NO: 2973. The ABP specific for A*01:01_NTDNNLAVY (SEQ ID NO: 23) may comprise a CDR-H1 that is SEQ ID NO: 2854, a CDR-H2 that is SEQ ID NO: 2882, a CDR-H3 that is SEQ ID NO: 2904, a CDR-L1 that is SEQ ID NO: 2937, a CDR-L2 that is SEQ ID NO: 2958, and a CDR-L3 that is SEQ ID NO: 2974. The ABP specific for A*01:01_NTDNNLAVY (SEQ ID NO: 23) may comprise a CDR-H1 that is SEQ ID NO: 2855, a CDR-H2 that is SEQ ID NO: 2883, a CDR-H3 that is SEQ ID NO: 2905, a CDR-L1 that is SEQ ID NO: 2937, a CDR-L2 that is SEQ ID NO: 2958, and a CDR-L3 that is SEQ ID NO: 2975. The ABP specific for A*01:01_NTDNNLAVY (SEQ ID NO: 23) may comprise a CDR-H1 that is SEQ ID NO: 2855, a CDR-H2 that is SEQ ID NO: 2882, a CDR-H3 that is SEQ ID NO: 2906, a CDR-L1 that is SEQ ID NO: 2938, a CDR-L2 that is SEQ ID NO: 2958, and a CDR-L3 that is SEQ ID NO: 2976. The ABP specific for A*01:01_NTDNNLAVY (SEQ ID NO: 23) may comprise a CDR-H1 that is SEQ ID NO: 2856, a CDR-H2 that is SEQ ID NO: 2882, a CDR-H3 that is SEQ ID NO: 2907, a CDR-L1 that is SEQ ID NO: 2939, a CDR-L2 that is SEQ ID NO: 2959, and a CDR-L3 that is SEQ ID NO: 2976. The ABP specific for A*01:01_NTDNNLAVY (SEQ ID NO: 23) may comprise a CDR-H1 that is SEQ ID NO: 2857, a CDR-H2 that is SEQ ID NO: 2882, a CDR-H3 that is SEQ ID NO: 2908, a CDR-L1 that is SEQ ID NO: 2940, a CDR-L2 that is SEQ ID NO: 2960, and a CDR-L3 that is SEQ ID NO: 2977. The ABP specific for A*01:01_NTDNNLAVY (SEQ ID NO: 23) may comprise a CDR-H1 that is SEQ ID NO: 2858, a CDR-H2 that is SEQ ID NO: 2884, a CDR-H3 that is SEQ ID NO: 2909, a CDR-L1 that is SEQ ID NO: 2935, a CDR-L2 that is SEQ ID NO: 2958, and a CDR-L3 that is SEQ ID NO: 2972. The ABP specific for A*01:01_NTDNNLAVY (SEQ ID NO: 23) may comprise a CDR-H1 that is SEQ ID NO: 2859, a CDR-H2 that is SEQ ID NO: 2882, a CDR-H3 that is SEQ ID NO: 2910, a CDR-L1 that is SEQ ID NO: 2941, a CDR-L2 that is SEQ ID NO: 2961, and a CDR-L3 that is SEQ ID NO: 2978. The ABP specific for A*01:01_NTDNNLAVY (SEQ ID NO: 23) may comprise a CDR-H1 that is SEQ ID NO: 2852, a CDR-H2 that is SEQ ID NO: 2885, a CDR-H3 that is SEQ ID NO: 2911, a CDR-L1 that is SEQ ID NO: 2942, a CDR-L2 that is SEQ ID NO: 2958, and a CDR-L3 that is SEQ ID NO: 2976. The ABP specific for A*01:01_NTDNNLAVY (SEQ ID NO: 23) may comprise a CDR-H1 that is SEQ ID NO: 2860, a CDR-H2 that is SEQ ID NO: 2882, a CDR-H3 that is SEQ ID NO: 2912, a CDR-L1 that is SEQ ID NO: 2943, a CDR-L2 that is SEQ ID NO: 2962, and a CDR-L3 that is SEQ ID NO: 2978. The ABP specific for A*01:01_NTDNNLAVY (SEQ ID NO: 23) may comprise a CDR-H1 that is SEQ ID NO: 2861, a CDR-H2 that is SEQ ID NO: 2886, a CDR-H3 that is SEQ ID NO: 2913, a CDR-L1 that is SEQ ID NO: 2944, a CDR-L2 that is SEQ ID NO: 2963, and a CDR-L3 that is SEQ ID NO: 2979. The ABP specific for A*01:01_NTDNNLAVY (SEQ ID NO: 23) may comprise a CDR-H1 that is SEQ ID NO: 2862, a CDR-H2 that is SEQ ID NO: 2887, a CDR-H3 that is SEQ ID NO: 2914, a CDR-L1 that is SEQ ID NO: 2945, a CDR-L2 that is SEQ ID NO: 2958, and a CDR-L3 that is SEQ ID NO: 2980. The ABP specific for A*01:01_NTDNNLAVY (SEQ ID NO: 23) may comprise a CDR-H1 that is SEQ ID NO: 2855, a CDR-H2 that is SEQ ID NO: 2888, a CDR-H3 that is SEQ ID NO: 2903, a CDR-L1 that is SEQ ID NO: 2941, a CDR-L2 that is SEQ ID NO: 2962, and a CDR-L3 that is SEQ ID NO: 2981. The ABP specific for A*01:01_NTDNNLAVY (SEQ ID NO: 23) may comprise a CDR-H1 that is SEQ ID NO: 2855, a CDR-H2 that is SEQ ID NO: 2889, a CDR-H3 that is SEQ ID NO: 2915, a CDR-L1 that is SEQ ID NO: 2946, a CDR-L2 that is SEQ ID NO: 2958, and a CDR-L3 that is SEQ ID NO: 2982. The ABP specific for A*01:01_NTDNNLAVY (SEQ ID NO: 23) may comprise a CDR-H1 that is SEQ ID NO: 2863, a CDR-H2 that is SEQ ID NO: 2883, a CDR-H3 that is SEQ ID NO: 2916, a CDR-L1 that is SEQ ID NO: 2947, a CDR-L2 that is SEQ ID NO: 2958, and a CDR-L3 that is SEQ ID NO: 2973. The ABP specific for A*01:01_NTDNNLAVY (SEQ ID NO: 23) may comprise a CDR-H1 that is SEQ ID NO: 2856, a CDR-H2 that is SEQ ID NO: 2890, a CDR-H3 that is SEQ ID NO: 2917, a CDR-L1 that is SEQ ID NO: 2934, a CDR-L2 that is SEQ ID NO: 2962, and a CDR-L3 that is SEQ ID NO: 2972. The ABP specific for A*01:01_NTDNNLAVY (SEQ ID NO: 23) may comprise a CDR-H1 that is SEQ ID NO: 2864, a CDR-H2 that is SEQ ID NO: 2891, a CDR-H3 that is SEQ ID NO: 2917, a CDR-L1 that is SEQ ID NO: 2946, a CDR-L2 that is SEQ ID NO: 2964, and a CDR-L3 that is SEQ ID NO: 2972. The ABP specific for A*01:01_NTDNNLAVY (SEQ ID NO: 23) may comprise a CDR-H1 that is SEQ ID NO: 2865, a CDR-H2 that is SEQ ID NO: 2882, a CDR-H3 that is SEQ ID NO: 2918, a CDR-L1 that is SEQ ID NO: 2941, a CDR-L2 that is SEQ ID NO: 2962, and a CDR-L3 that is SEQ ID NO: 2974. The ABP specific for A*01:01_NTDNNLAVY (SEQ ID NO: 23) may comprise a CDR-H1 that is SEQ ID NO: 2866, a CDR-H2 that is SEQ ID NO: 2882, a CDR-H3 that is SEQ ID NO: 2919, a CDR-L1 that is SEQ ID NO: 2948, a CDR-L2 that is SEQ ID NO: 2958, and a CDR-L3 that is SEQ ID NO: 2983. The ABP specific for A*01:01_NTDNNLAVY (SEQ ID NO: 23) may comprise a CDR-H1 that is SEQ ID NO: 2867, a CDR-H2 that is SEQ ID NO: 2892, a CDR-H3 that is SEQ ID NO: 2920, a CDR-L1 that is SEQ ID NO: 2946, a CDR-L2 that is SEQ ID NO: 2962, and a CDR-L3 that is SEQ ID NO: 2984. The ABP specific for A*01:01_NTDNNLAVY (SEQ ID NO: 23) may comprise a CDR-H1 that is SEQ ID NO: 2868, a CDR-H2 that is SEQ ID NO: 2893, a CDR-H3 that is SEQ ID NO: 2921, a CDR-L1 that is SEQ ID NO: 2949, a CDR-L2 that is SEQ ID NO: 2965, and a CDR-L3 that is SEQ ID NO: 2972. The ABP specific for A*01:01_NTDNNLAVY (SEQ ID NO: 23) may comprise a CDR-H1 that is SEQ ID NO: 2869, a CDR-H2 that is SEQ ID NO: 2894, a CDR-H3 that is SEQ ID NO: 2922, a CDR-L1 that is SEQ ID NO: 2950, a CDR-L2 that is SEQ ID NO: 2966, and a CDR-L3 that is SEQ ID NO: 2985. The ABP specific for A*01:01_NTDNNLAVY (SEQ ID NO: 23) may comprise a CDR-H1 that is SEQ ID NO: 2870, a CDR-H2 that is SEQ ID NO: 2882, a CDR-H3 that is SEQ ID NO: 2923, a CDR-L1 that is SEQ ID NO: 2943, a CDR-L2 that is SEQ ID NO: 2967, and a CDR-L3 that is SEQ ID NO: 2986. The ABP specific for A*01:01_NTDNNLAVY (SEQ ID NO: 23) may comprise a CDR-H1 that is SEQ ID NO: 2871, a CDR-H2 that is SEQ ID NO: 2895, a CDR-H3 that is SEQ ID NO: 2924, a CDR-L1 that is SEQ ID NO: 2951, a CDR-L2 that is SEQ ID NO: 2968, and a CDR-L3 that is SEQ ID NO: 2987. The ABP specific for A*01:01_NTDNNLAVY (SEQ ID NO: 23) may comprise a CDR-H1 that is SEQ ID NO: 2872, a CDR-H2 that is SEQ ID NO: 2882, a CDR-H3 that is SEQ ID NO: 2925, a CDR-L1 that is SEQ ID NO: 2952, a CDR-L2 that is SEQ ID NO: 2969, and a CDR-L3 that is SEQ ID NO: 2973. The ABP specific for A*01:01_NTDNNLAVY (SEQ ID NO: 23) may comprise a CDR-H1 that is SEQ ID NO: 2873, a CDR-H2 that is SEQ ID NO: 2882, a CDR-H3 that is SEQ ID NO: 2926, a CDR-L1 that is SEQ ID NO: 2943, a CDR-L2 that is SEQ ID NO: 2958, and a CDR-L3 that is SEQ ID NO: 2988. The ABP specific for A*01:01_NTDNNLAVY (SEQ ID NO: 23) may comprise a CDR-H1 that is SEQ ID NO: 2852, a CDR-H2 that is SEQ ID NO: 2882, a CDR-H3 that is SEQ ID NO: 2927, a CDR-L1 that is SEQ ID NO: 2935, a CDR-L2 that is SEQ ID NO: 2958, and a CDR-L3 that is SEQ ID NO: 2989. The ABP specific for A*01:01_NTDNNLAVY (SEQ ID NO: 23) may comprise a CDR-H1 that is SEQ ID NO: 2874, a CDR-H2 that is SEQ ID NO: 2896, a CDR-H3 that is SEQ ID NO: 2928, a CDR-L1 that is SEQ ID NO: 2938, a CDR-L2 that is SEQ ID NO: 2958, and a CDR-L3 that is SEQ ID NO: 2981. The ABP specific for A*01:01_NTDNNLAVY (SEQ ID NO: 23) may comprise a CDR-H1 that is SEQ ID NO: 2875, a CDR-H2 that is SEQ ID NO: 2897, a CDR-H3 that is SEQ ID NO: 2929, a CDR-L1 that is SEQ ID NO: 2953, a CDR-L2 that is SEQ ID NO: 2961, and a CDR-L3 that is SEQ ID NO: 2990. The ABP specific for A*01:01_NTDNNLAVY (SEQ ID NO: 23) may comprise a CDR-H1 that is SEQ ID NO: 2876, a CDR-H2 that is SEQ ID NO: 2898, a CDR-H3 that is SEQ ID NO: 2930, a CDR-L1 that is SEQ ID NO: 2941, a CDR-L2 that is SEQ ID NO: 2962, and a CDR-L3 that is SEQ ID NO: 2989. The ABP specific for A*01:01_NTDNNLAVY (SEQ ID NO: 23) may comprise a CDR-H1 that is SEQ ID NO: 2877, a CDR-H2 that is SEQ ID NO: 2899, a CDR-H3 that is SEQ ID NO: 2931, a CDR-L1 that is SEQ ID NO: 2946, a CDR-L2 that is SEQ ID NO: 2964, and a CDR-L3 that is SEQ ID NO: 2991. The ABP specific for A*01:01_NTDNNLAVY (SEQ ID NO: 23) may comprise a CDR-H1 that is SEQ ID NO: 2878, a CDR-H2 that is SEQ ID NO: 2900, a CDR-H3 that is SEQ ID NO: 2932, a CDR-L1 that is SEQ ID NO: 2946, a CDR-L2 that is SEQ ID NO: 2958, and a CDR-L3 that is SEQ ID NO: 2992. The ABP specific for A*01:01_NTDNNLAVY (SEQ ID NO: 23) may comprise a CDR-H1 that is SEQ ID NO: 2879, a CDR-H2 that is SEQ ID NO: 2901, a CDR-H3 that is SEQ ID NO: 2933, a CDR-L1 that is SEQ ID NO: 2954, a CDR-L2 that is SEQ ID NO: 2970, and a CDR-L3 that is SEQ ID NO: 2993.

[0257] VL

[0258] The ABP specific for A*01:01_NTDNNLAVY (SEQ ID NO: 23) may comprise a VL sequence. The VL sequence may be SEQ ID NO: 2816. The VL sequence may be SEQ ID NO: 2817. The VL sequence may be SEQ ID NO: 2818. The VL sequence may be SEQ ID NO: 2819. The VL sequence may be SEQ ID NO: 2820. The VL sequence may be SEQ ID NO: 2821. The VL sequence may be SEQ ID NO: 2822. The VL sequence may be SEQ ID NO: 2823. The VL sequence may be SEQ ID NO: 2824. The VL sequence may be SEQ ID NO: 2825. The VL sequence may be SEQ ID NO: 2826. The VL sequence may be SEQ ID NO: 2827. The VL sequence may be SEQ ID NO: 2828. The VL sequence may be SEQ ID NO: 2829. The VL sequence may be SEQ ID NO: 2830. The VL sequence may be SEQ ID NO: 2831. The VL sequence may be SEQ ID NO: 2832. The VL sequence may be SEQ ID NO: 2833. The VL sequence may be SEQ ID NO: 2834. The VL sequence may be SEQ ID NO: 2835. The VL sequence may be SEQ ID NO: 2836. The VL sequence may be SEQ ID NO: 2837. The VL sequence may be SEQ ID NO: 2838. The VL sequence may be SEQ ID NO: 2839. The VL sequence may be SEQ ID NO: 2840. The VL sequence may be SEQ ID NO: 2841. The VL sequence may be SEQ ID NO: 2842. The VL sequence may be SEQ ID NO: 2843. The VL sequence may be SEQ ID NO: 2844. The VL sequence may be SEQ ID NO: 2845. The VL sequence may be SEQ ID NO: 2846. The VL sequence may be SEQ ID NO: 2847. The VL sequence may be SEQ ID NO: 2848. The VL sequence may be SEQ ID NO: 2849. The VL sequence may be SEQ ID NO: 2850.

[0259] VH

[0260] The ABP specific for A*01:01_NTDNNLAVY (SEQ ID NO: 23) may comprise a VH sequence. The VH sequence may be SEQ ID NO: 2781. The VH sequence may be SEQ ID NO: 2782. The VH sequence may be SEQ ID NO: 2783. The VH sequence may be SEQ ID NO: 2784. The VH sequence may be SEQ ID NO: 2785. The VH sequence may be SEQ ID NO: 2786. The VH sequence may be SEQ ID NO: 2787. The VH sequence may be SEQ ID NO: 2788. The VH sequence may be SEQ ID NO: 2789. The VH sequence may be SEQ ID NO: 2790. The VH sequence may be SEQ ID NO: 2791. The VH sequence may be SEQ ID NO: 2792. The VH sequence may be SEQ ID NO: 2793. The VH sequence may be SEQ ID NO: 2794. The VH sequence may be SEQ ID NO: 2795. The VH sequence may be SEQ ID NO: 2796. The VH sequence may be SEQ ID NO: 2797. The VH sequence may be SEQ ID NO: 2798. The VH sequence may be SEQ ID NO: 2799. The VH sequence may be SEQ ID NO: 2800. The VH sequence may be SEQ ID NO: 2801. The VH sequence may be SEQ ID NO: 2802. The VH sequence may be SEQ ID NO: 2803. The VH sequence may be SEQ ID NO: 2804. The VH sequence may be SEQ ID NO: 2805. The VH sequence may be SEQ ID NO: 2806. The VH sequence may be SEQ ID NO: 2807. The VH sequence may be SEQ ID NO: 2808. The VH sequence may be SEQ ID NO: 2809. The VH sequence may be SEQ ID NO: 2810. The VH sequence may be SEQ ID NO: 2811. The VH sequence may be SEQ ID NO: 2812. The VH sequence may be SEQ ID NO: 2813. The VH sequence may be SEQ ID NO: 2814. The VH sequence may be SEQ ID NO: 2815.

[0261] VH-VL Combinations

[0262] The ABP specific for A*01:01_NTDNNLAVY (SEQ ID NO: 23) may comprise a VH sequence that is SEQ ID NO: 2781 and a VL sequence that is SEQ ID NO: 2816. The ABP specific for A*01:01_NTDNNLAVY (SEQ ID NO: 23) may comprise a VH sequence that is SEQ ID NO: 2782 and a VL sequence that is SEQ ID NO: 2817. The ABP specific for A*01:01_NTDNNLAVY (SEQ ID NO: 23) may comprise a VH sequence that is SEQ ID NO: 2783 and a VL sequence that is SEQ ID NO: 2818. The ABP specific for A*01:01_NTDNNLAVY (SEQ ID NO: 23) may comprise a VH sequence that is SEQ ID NO: 2784 and a VL sequence that is SEQ ID NO: 2819. The ABP specific for A*01:01_NTDNNLAVY (SEQ ID NO: 23) may comprise a VH sequence that is SEQ ID NO: 2785 and a VL sequence that is SEQ ID NO: 2820. The ABP specific for A*01:01_NTDNNLAVY (SEQ ID NO: 23) may comprise a VH sequence that is SEQ ID NO: 2786 and a VL sequence that is SEQ ID NO: 2821. The ABP specific for A*01:01_NTDNNLAVY (SEQ ID NO: 23) may comprise a VH sequence that is SEQ ID NO: 2787 and a VL sequence that is SEQ ID NO: 2822. The ABP specific for A*01:01_NTDNNLAVY (SEQ ID NO: 23) may comprise a VH sequence that is SEQ ID NO: 2788 and a VL sequence that is SEQ ID NO: 2823. The ABP specific for A*01:01_NTDNNLAVY (SEQ ID NO: 23) may comprise a VH sequence that is SEQ ID NO: 2789 and a VL sequence that is SEQ ID NO: 2824. The ABP specific for A*01:01_NTDNNLAVY (SEQ ID NO: 23) may comprise a VH sequence that is SEQ ID NO: 2790 and a VL sequence that is SEQ ID NO: 2825. The ABP specific for A*01:01_NTDNNLAVY (SEQ ID NO: 23) may comprise a VH sequence that is SEQ ID NO: 2791 and a VL sequence that is SEQ ID NO: 2826. The ABP specific for A*01:01_NTDNNLAVY (SEQ ID NO: 23) may comprise a VH sequence that is SEQ ID NO: 2792 and a VL sequence that is SEQ ID NO: 2827. The ABP specific for A*01:01_NTDNNLAVY (SEQ ID NO: 23) may comprise a VH sequence that is SEQ ID NO: 2793 and a VL sequence that is SEQ ID NO: 2828. The ABP specific for A*01:01_NTDNNLAVY (SEQ ID NO: 23) may comprise a VH sequence that is SEQ ID NO: 2794 and a VL sequence that is SEQ ID NO: 2829. The ABP specific for A*01:01_NTDNNLAVY (SEQ ID NO: 23) may comprise a VH sequence that is SEQ ID NO: 2795 and a VL sequence that is SEQ ID NO: 2830. The ABP specific for A*01:01_NTDNNLAVY (SEQ ID NO: 23) may comprise a VH sequence that is SEQ ID NO: 2796 and a VL sequence that is SEQ ID NO: 2831. The ABP specific for A*01:01_NTDNNLAVY (SEQ ID NO: 23) may comprise a VH sequence that is SEQ ID NO: 2797 and a VL sequence that is SEQ ID NO: 2832. The ABP specific for A*01:01_NTDNNLAVY (SEQ ID NO: 23) may comprise a VH sequence that is SEQ ID NO: 2798 and a VL sequence that is SEQ ID NO: 2833. The ABP specific for A*01:01_NTDNNLAVY (SEQ ID NO: 23) may comprise a VH sequence that is SEQ ID NO: 2799 and a VL sequence that is SEQ ID NO: 2834. The ABP specific for A*01:01_NTDNNLAVY (SEQ ID NO: 23) may comprise a VH sequence that is SEQ ID NO: 2800 and a VL sequence that is SEQ ID NO: 2835. The ABP specific for A*01:01_NTDNNLAVY (SEQ ID NO: 23) may comprise a VH sequence that is SEQ ID NO: 2801 and a VL sequence that is SEQ ID NO: 2836. The ABP specific for A*01:01_NTDNNLAVY (SEQ ID NO: 23) may comprise a VH sequence that is SEQ ID NO: 2802 and a VL sequence that is SEQ ID NO: 2837. The ABP specific for A*01:01_NTDNNLAVY (SEQ ID NO: 23) may comprise a VH sequence that is SEQ ID NO: 2803 and a VL sequence that is SEQ ID NO: 2838. The ABP specific for A*01:01_NTDNNLAVY (SEQ ID NO: 23) may comprise a VH sequence that is SEQ ID NO: 2804 and a VL sequence that is SEQ ID NO: 2839. The ABP specific for A*01:01_NTDNNLAVY (SEQ ID NO: 23) may comprise a VH sequence that is SEQ ID NO: 2805 and a VL sequence that is SEQ ID NO: 2840. The ABP specific for A*01:01_NTDNNLAVY (SEQ ID NO: 23) may comprise a VH sequence that is SEQ ID NO: 2806 and a VL sequence that is SEQ ID NO: 2841. The ABP specific for A*01:01_NTDNNLAVY (SEQ ID NO: 23) may comprise a VH sequence that is SEQ ID NO: 2807 and a VL sequence that is SEQ ID NO: 2842. The ABP specific for A*01:01_NTDNNLAVY (SEQ ID NO: 23) may comprise a VH sequence that is SEQ ID NO: 2808 and a VL sequence that is SEQ ID NO: 2843. The ABP specific for A*01:01_NTDNNLAVY (SEQ ID NO: 23) may comprise a VH sequence that is SEQ ID NO: 2809 and a VL sequence that is SEQ ID NO: 2844. The ABP specific for A*01:01_NTDNNLAVY (SEQ ID NO: 23) may comprise a VH sequence that is SEQ ID NO: 2810 and a VL sequence that is SEQ ID NO: 2845. The ABP specific for A*01:01_NTDNNLAVY (SEQ ID NO: 23) may comprise a VH sequence that is SEQ ID NO: 2811 and a VL sequence that is SEQ ID NO: 2846. The ABP specific for A*01:01_NTDNNLAVY (SEQ ID NO: 23) may comprise a VH sequence that is SEQ ID NO: 2812 and a VL sequence that is SEQ ID NO: 2847. The ABP specific for A*01:01_NTDNNLAVY (SEQ ID NO: 23) may comprise a VH sequence that is SEQ ID NO: 2813 and a VL sequence that is SEQ ID NO: 2848. The ABP specific for A*01:01_NTDNNLAVY (SEQ ID NO: 23) may comprise a VH sequence that is SEQ ID NO: 2814 and a VL sequence that is SEQ ID NO: 2849. The ABP specific for A*01:01_NTDNNLAVY (SEQ ID NO: 23) may comprise a VH sequence that is SEQ ID NO: 2815 and a VL sequence that is SEQ ID NO: 2850.

[0263] Receptors

[0264] Among the provided ABPs, e.g., HLA-PEPTIDE ABPs, are receptors. The receptors can include antigen receptors and other chimeric receptors that specifically bind an HLA-PEPTIDE target disclosed herein. The receptor may be a T cell receptor (TCR). The receptor may be a chimeric antigen receptor (CAR).

[0265] TCRs can be soluble or membrane-bound. Among the antigen receptors are functional non-TCR antigen receptors, such as chimeric antigen receptors (CARs). Also provided are cells expressing the receptors and uses thereof in adoptive cell therapy, such as treatment of diseases and disorders associated with HLA-PEPTIDE expression, including cancer.

[0266] Exemplary antigen receptors, including CARs, and methods for engineering and introducing such receptors into cells, include those described, for example, in international patent application publication numbers WO200014257, WO2013126726, WO2012/129514, WO2014031687, WO2013/166321, WO2013/071154, WO2013/123061 U.S. patent application publication numbers US2002131960, US2013287748, US20130149337, U.S. Pat. Nos. 6,451,995, 7,446,190, 8,252,592, 8,339,645, 8,398,282, 7,446,179, 6,410,319, 7,070,995, 7,265,209, 7,354,762, 7,446,191, 8,324,353, and 8,479,118, and European patent application number EP2537416, and/or those described by Sadelain et al., Cancer Discov. 2013 April; 3(4): 388-398; Davila et al. (2013) PLoS ONE 8(4): e61338; Turtle et al., Curr. Opin. Immunol., 2012 October; 24(5): 633-39; Wu et al., Cancer, 2012 Mar. 18(2): 160-75. In some aspects, the antigen receptors include a CAR as described in U.S. Pat. No. 7,446,190, and those described in International Patent Application Publication No.: WO/2014055668 A1. Exemplary of the CARs include CARs as disclosed in any of the aforementioned publications, such as WO2014031687, U.S. Pat. Nos. 8,339,645, 7,446,179, US 2013/0149337, U.S. Pat. Nos. 7,446,190, 8,389,282, e.g., and in which the antigen-binding portion, e.g., scFv, is replaced by an antibody, e.g., as provided herein.

[0267] Among the chimeric receptors are chimeric antigen receptors (CARs). The chimeric receptors, such as CARs, generally include an extracellular antigen binding domain that includes, is, or is comprised within, one of the provided anti-HLA-PEPTIDE ABPs such as anti-HLA-PEPTIDE antibodies. Thus, the chimeric receptors, e.g., CARs, typically include in their extracellular portions one or more HLA-PEPTIDE-ABPs, such as one or more antigen-binding fragment, domain, or portion, or one or more antibody variable domains, and/or antibody molecules, such as those described herein. In some embodiments, the CAR includes a HLA-PEPTIDE-binding portion or portions of the ABP (e.g., antibody) molecule, such as a variable heavy (VH) chain region and/or variable light (VL) chain region of the antibody, e.g., an scFv antibody fragment.

[0268] TCRs

[0269] In an aspect, the ABPs provided herein, e.g., ABPs that specifically bind HLA-PEPTIDE targets disclosed herein, include T cell receptors (TCRs). The TCRs may be isolated and purified.

[0270] In a majority of T-cells, the TCR is a heterodimer polypeptide having an alpha (α) chain and beta-(β) chain, encoded by TRA and TRB, respectively. The alpha chain generally comprises an alpha variable region, encoded by TRAV, an alpha joining region, encoded by TRAJ, and an alpha constant region, encoded by TRAC. The beta chain generally comprises a beta variable region, encoded by TRBV, a beta diversity region, encoded by TRBD, a beta joining region, encoded by TRBJ, and a beta constant region, encoded by TRBC. The TCR-alpha chain is generated by VJ recombination, and the beta chain receptor is generated by V(D)J recombination. Additional TCR diversity stems from junctional diversity. Several bases may be deleted and others added (called N and P nucleotides) at each of the junctions. In a minority of T-cells, the TCRs include gamma and delta chains. The TCR gamma chain is generated by VJ recombination, and the TCR delta chain is generated by V(D)J recombination (Kenneth Murphy, Paul Travers, and Mark Walport, Janeway's Immunology 7th edition, Garland Science, 2007, which is herein incorporated by reference in its entirety). The antigen binding site of a TCR generally comprises six complementarity determining regions (CDRs). The alpha chain contributes three CDRs, alpha CDR1, alpha CDR2, and αCDR3. The beta chain also contributes three CDR: beta CDR1, beta CDR2, and βCDR3. The αCDR3 and βCDR3 are the regions most affected by V(D)J recombination and account for most of the variation in a TCR repertoire.

[0271] TCRs can specifically recognize HLA-PEPTIDE targets, such as an HLA-PEPTIDE target disclosed in Table A; thus TCRs can be ABPs that specifically bind to HLA-PEPTIDE. TCRs can be soluble, e.g., similar to an antibody secreted by a B cell. TCRs can also be membrane-bound, e.g., on a cell such as a T cell or NK cell. Thus, TCRs can be used in a context that corresponds to soluble antibodies and/or membrane-bound CARs.

[0272] Any of the TCRs disclosed herein may comprise an alpha variable region, an alpha joining region, optionally an alpha constant region, a beta variable region, optionally a beta diversity region, a beta joining region, and optionally a beta constant region.

[0273] In some embodiments, the TCR or CAR is a recombinant TCR or CAR. The recombinant TCR or CAR may include any of the TCRs identified herein but include one or more modifications. Exemplary modifications, e.g., amino acid substitutions, are described herein. Amino acid substitutions described herein may be made with reference to IMGT nomenclature and amino acid numbering as found at www.imgt.org.

[0274] The recombinant TCR or CAR may be a human TCR or CAR, comprising fully human sequences, e.g., natural human sequences. The recombinant TCR or CAR may retain its natural human variable domain sequences but contain modifications to the α constant region, β constant region, or both α and β constant regions. Such modifications to the TCR constant regions may improve TCR assembly and expression for TCR gene therapy by, e.g., driving preferential pairings of the exogenous TCR chains.

[0275] In some embodiments, the α and β constant regions are modified by substituting the entire human constant region sequences for mouse constant region sequences. Such “murinized” TCRs and methods of making them are described in Cancer Res. 2006 Sep. 1; 66(17):8878-86, which is hereby incorporated by reference in its entirety.

[0276] In some embodiments, the α and β constant regions are modified by making one or more amino acid substitutions in the human TCR α constant (TRAC) region, the TCR β constant (TRBC) region, or the TRAC and TRAB regions, which swap particular human residues for murine residues (human [symbol] murine amino acid exchange). The one or more amino acid substitutions in the TRAC region may include a Ser substitution at residue 90, an Asp substitution at residue 91, a Val substitution at residue 92, a Pro substitution at residue 93, or any combination thereof. The one or more amino acid substitutions in the human TRBC region may include a Lys substitution at residue 18, an Ala substitution at residue 22, an Ile substitution at residue 133, a His substitution at residue 139, or any combination of the above. Such targeted amino acid substitutions are described in J Immunol Jun. 1, 2010, 184 (11) 6223-6231, which is hereby incorporated by reference in its entirety.

[0277] In some embodiments, the human TRAC contains an Asp substitution at residue 210 and the human TRBC contains a Lys substitution at residue 134. Such substitutions may promote the formation of a salt bridge between the alpha and beta chains and formation of the TCR interchain disulfide bond. These targeted substitutions are described in J Immunol Jun. 1, 2010, 184 (11) 6232-6241, which is hereby incorporated by reference in its entirety.

[0278] In some embodiments, the human TRAC and human TRBC regions are modified to contain introduced cysteines which may improve preferential pairing of the exogenous TCR chains through formation of an additional disulfide bond. For example, the human TRAC may contain a Cys substitution at residue 48 and the human TRBC may contain a Cys substitution at residue 57, described in Cancer Res. 2007 Apr. 15; 67(8):3898-903 and Blood. 2007 Mar. 15; 109(6):2331-8, which are hereby incorporated by reference in their entirety.

[0279] The recombinant TCR or CAR may comprise other modifications to the α and β chains.

[0280] In some embodiments, the α and β chains are modified by linking the extracellular domains of the α and β chains to a complete human CD3E (CD3-zeta) molecule. Such modifications are described in J Immunol Jun. 1, 2008, 180 (11) 7736-7746; Gene Ther. 2000 August; 7(16):1369-77; and The Open Gene Therapy Journal, 2011, 4: 11-22, which are hereby incorporated by reference in their entirety.

[0281] In some embodiments, the α chain is modified by introducing hydrophobic amino acid substitutions in the transmembrane region of the α chain, as described in J Immunol Jun. 1, 2012, 188 (11) 5538-5546; hereby incorporated by reference in their entirety.

[0282] The alpha or beta chain may be modified by altering any one of the N-glycosylation sites in the amino acid sequence, as described in J Exp Med. 2009 Feb. 16; 206(2): 463-475; hereby incorporated by reference in its entirety.

[0283] The alpha and beta chain may each comprise a dimerization domain, e.g., a heterologous dimerization domain. Such a heterologous domain may be a leucine zipper, a 5H3 domain or hydrophobic proline rich counter domains, or other similar modalities, as known in the art. In one example, the alpha and beta chains may be modified by introducing 30mer segments to the carboxyl termini of the alpha and beta extracellular domains, wherein the segments selectively associate to form a stable leucine zipper. Such modifications are described in PNAS Nov. 22, 1994. 91 (24) 11408-11412; https://doi.org/10.1073/pnas.91.24.11408; hereby incorporated by reference in its entirety.

[0284] TCRs identified herein may be modified to include mutations that result in increased affinity or half-life, such as those described in WO2012/013913, hereby incorporated by reference in its entirety.

[0285] The recombinant TCR or CAR may be a single chain TCR (scTCR). Such scTCR may comprise an α chain variable region sequence fused to the N terminus of a TCR α chain constant region extracellular sequence, a TCR β chain variable region fused to the N terminus of a TCR β chain constant region extracellular sequence, and a linker sequence linking the C terminus of the α segment to the N terminus of the β segment, or vice versa. In some embodiments, the constant region extracellular sequences of the α and β segments of the scTCR are linked by a disulfide bond. In some embodiments, the length of the linker sequence and the position of the disulfide bond being such that the variable region sequences of the α and β segments are mutually orientated substantially as in native αβ T cell receptors. Exemplary scTCRs are described in U.S. Pat. No. 7,569,664, which is hereby incorporated by reference in its entirety.

[0286] In some cases, the variable regions of the scTCR may be covalently joined by a short peptide linker, such as described in Gene Therapy volume 7, pages 1369-1377 (2000). The short peptide linker may be a serine rich or glycine rich linker. For example, the linker may be (Gly₄Ser)₃, as described in Cancer Gene Therapy (2004) 11, 487-496, incorporated by reference in its entirety.

[0287] The recombinant TCR or antigen binding fragment thereof may be expressed as a fusion protein. For instance, the TCR or antigen binding fragment thereof may be fused with a toxin. Such fusion proteins are described in Cancer Res. 2002 Mar. 15; 62(6):1757-60. The TCR or antigen binding fragment thereof may be fused with an antibody Fc region. Such fusion proteins are described in J Immunol May 1, 2017, 198 (1 Supplement) 120.9.

[0288] In some embodiments, the recombinant receptor such as a TCR or CAR, such as the antibody portion thereof, further includes a spacer, which may be or include at least a portion of an immunoglobulin constant region or variant or modified version thereof, such as a hinge region, e.g., an IgG4 hinge region, and/or a CH1/CL and/or Fc region. In some embodiments, the constant region or portion is of a human IgG such as IgG4 or IgG1. In some aspects, the portion of the constant region serves as a spacer region between the antigen-recognition component, e.g., scFv, and transmembrane domain. The spacer can be of a length that provides for increased responsiveness of the cell following antigen binding, as compared to in the absence of the spacer. In some examples, the spacer is at or about 12 amino acids in length or is no more than 12 amino acids in length. Exemplary spacers include those having at least about 10 to 229 amino acids, about 10 to 200 amino acids, about 10 to 175 amino acids, about 10 to 150 amino acids, about 10 to 125 amino acids, about 10 to 100 amino acids, about 10 to 75 amino acids, about 10 to 50 amino acids, about 10 to 40 amino acids, about 10 to 30 amino acids, about 10 to 20 amino acids, or about 10 to 15 amino acids, and including any integer between the endpoints of any of the listed ranges. In some embodiments, a spacer region has about 12 amino acids or less, about 119 amino acids or less, or about 229 amino acids or less. Exemplary spacers include IgG4 hinge alone, IgG4 hinge linked to CH2 and CH3 domains, or IgG4 hinge linked to the CH3 domain. Exemplary spacers include, but are not limited to, those described in Hudecek et al. (2013) Clin. Cancer Res., 19:3153 or international patent application publication number WO2014031687. In some embodiments, the constant region or portion is of IgD.

[0289] The antigen recognition domain of a receptor such as a TCR or CAR can be linked to one or more intracellular signaling components, such as signaling components that mimic activation through an antigen receptor complex, such as a TCR complex, in the case of a CAR, and/or signal via another cell surface receptor. Thus, in some embodiments, the HLA-PEPTIDE-specific binding component (e.g., ABP such as antibody or TCR) is linked to one or more transmembrane and intracellular signaling domains. In some embodiments, the transmembrane domain is fused to the extracellular domain. In one embodiment, a transmembrane domain that naturally is associated with one of the domains in the receptor, e.g., CAR, is used. In some instances, the transmembrane domain is selected or modified by amino acid substitution to avoid binding of such domains to the transmembrane domains of the same or different surface membrane proteins to minimize interactions with other members of the receptor complex.

[0290] The transmembrane domain in some embodiments is derived either from a natural or from a synthetic source. Where the source is natural, the domain in some aspects is derived from any membrane-bound or transmembrane protein. Transmembrane regions include those derived from (i.e. comprise at least the transmembrane region(s) of) the alpha, beta or zeta chain of the T-cell receptor, CD28, CD3 epsilon, CD45, CD4, CD5, CDS, CD9, CD 16, CD22, CD33, CD37, CD64, CD80, CD86, CD 134, CD137, and/or CD 154. Alternatively the transmembrane domain in some embodiments is synthetic. In some aspects, the synthetic transmembrane domain comprises predominantly hydrophobic residues such as leucine and valine. In some aspects, a triplet of phenylalanine, tryptophan and valine will be found at each end of a synthetic transmembrane domain. In some embodiments, the linkage is by linkers, spacers, and/or transmembrane domain(s).

[0291] Among the intracellular signaling domains are those that mimic or approximate a signal through a natural antigen receptor, a signal through such a receptor in combination with a costimulatory receptor, and/or a signal through a costimulatory receptor alone. In some embodiments, a short oligo- or polypeptide linker, for example, a linker of between 2 and 10 amino acids in length, such as one containing glycines and serines, e.g., glycine-serine doublet, is present and forms a linkage between the transmembrane domain and the cytoplasmic signaling domain of the receptor.

[0292] The receptor, e.g., the TCR or CAR, can include at least one intracellular signaling component or components. In some embodiments, the receptor includes an intracellular component of a TCR complex, such as a TCR CD3 chain that mediates T-cell activation and cytotoxicity, e.g., CD3 zeta chain. Thus, in some aspects, the HLA-PEPTIDE-binding ABP (e.g., antibody) is linked to one or more cell signaling modules. In some embodiments, cell signaling modules include CD3 transmembrane domain, CD3 intracellular signaling domains, and/or other CD transmembrane domains. In some embodiments, the receptor, e.g., CAR, further includes a portion of one or more additional molecules such as Fc receptor-gamma, CD8, CD4, CD25, or CD16. For example, in some aspects, the CAR includes a chimeric molecule between CD3-zeta or Fc receptor-gamma and CD8, CD4, CD25 or CD16.

[0293] In some embodiments, upon ligation of the TCR or CAR, the cytoplasmic domain or intracellular signaling domain of the receptor activates at least one of the normal effector functions or responses of the immune cell, e.g., T cell engineered to express the receptor. For example, in some contexts, the receptor induces a function of a T cell such as cytolytic activity or T-helper activity, such as secretion of cytokines or other factors. In some embodiments, a truncated portion of an intracellular signaling domain of an antigen receptor component or costimulatory molecule is used in place of an intact immunostimulatory chain, for example, if it transduces the effector function signal. In some embodiments, the intracellular signaling domain or domains include the cytoplasmic sequences of the T cell receptor (TCR), and in some aspects also those of co-receptors that in the natural context act in concert with such receptor to initiate signal transduction following antigen receptor engagement, and/or any derivative or variant of such molecules, and/or any synthetic sequence that has the same functional capability.

[0294] In the context of a natural TCR, full activation generally requires not only signaling through the TCR, but also a costimulatory signal. Thus, in some embodiments, to promote full activation, a component for generating secondary or co-stimulatory signal is also included in the receptor. In other embodiments, the receptor does not include a component for generating a costimulatory signal. In some aspects, an additional receptor is expressed in the same cell and provides the component for generating the secondary or costimulatory signal.

[0295] T cell activation is in some aspects described as being mediated by two classes of cytoplasmic signaling sequences: those that initiate antigen-dependent primary activation through the TCR (primary cytoplasmic signaling sequences), and those that act in an antigen-independent manner to provide a secondary or co-stimulatory signal (secondary cytoplasmic signaling sequences). In some aspects, the receptor includes one or both of such signaling components.

[0296] In some aspects, the receptor includes a primary cytoplasmic signaling sequence that regulates primary activation of the TCR complex. Primary cytoplasmic signaling sequences that act in a stimulatory manner may contain signaling motifs which are known as immunoreceptor tyrosine-based activation motifs or ITAMs. Examples of ITAM containing primary cytoplasmic signaling sequences include those derived from TCR or CD3 zeta, FcR gamma, FcR beta, CD3 gamma, CD3 delta, CD3 epsilon, CDS, CD22, CD79a, CD79b, and CD66d. In some embodiments, cytoplasmic signaling molecule(s) in the CAR contain(s) a cytoplasmic signaling domain, portion thereof, or sequence derived from CD3 zeta.

[0297] In some embodiments, the receptor includes a signaling domain and/or transmembrane portion of a costimulatory receptor, such as CD28, 4-1BB, OX40, DAP10, and ICOS. In some aspects, the same receptor includes both the activating and costimulatory components.

[0298] In some embodiments, the activating domain is included within one receptor, whereas the costimulatory component is provided by another receptor recognizing another antigen. In some embodiments, the receptors include activating or stimulatory receptors, and costimulatory receptors, both expressed on the same cell (see WO2014/055668). In some aspects, the HLA-PEPTIDE-targeting receptor is the stimulatory or activating receptor; in other aspects, it is the costimulatory receptor. In some embodiments, the cells further include inhibitory receptors (e.g., iCARs, see Fedorov et al., Sci. Transl. Medicine, 5(215) (December, 2013), such as a receptor recognizing an antigen other than HLA-PEPTIDE, whereby an activating signal delivered through the HLA-PEPTIDE-targeting receptor is diminished or inhibited by binding of the inhibitory receptor to its ligand, e.g., to reduce off-target effects.

[0299] In certain embodiments, the intracellular signaling domain comprises a CD28 transmembrane and signaling domain linked to a CD3 (e.g., CD3-zeta) intracellular domain. In some embodiments, the intracellular signaling domain comprises a chimeric CD28 and CD137 (4-1BB, TNFRSF9) co-stimulatory domains, linked to a CD3 zeta intracellular domain.

[0300] In some embodiments, the receptor encompasses one or more, e.g., two or more, costimulatory domains and an activation domain, e.g., primary activation domain, in the cytoplasmic portion. Exemplary receptors include intracellular components of CD3-zeta, CD28, and 4-1BB.

[0301] In some embodiments, the CAR or other antigen receptor such as a TCR further includes a marker, such as a cell surface marker, which may be used to confirm transduction or engineering of the cell to express the receptor, such as a truncated version of a cell surface receptor, such as truncated EGFR (tEGFR). In some aspects, the marker includes all or part (e.g., truncated form) of CD34, a NGFR, or epidermal growth factor receptor (e.g., tEGFR). In some embodiments, the nucleic acid encoding the marker is operably linked to a polynucleotide encoding for a linker sequence, such as a cleavable linker sequence or a ribosomal skip sequence, e.g., T2A. See WO2014031687. In some embodiments, introduction of a construct encoding the CAR and EGFRt separated by a T2A ribosome switch can express two proteins from the same construct, such that the EGFRt can be used as a marker to detect cells expressing such construct. In some embodiments, a marker, and optionally a linker sequence, can be any as disclosed in published patent application No. WO2014031687. For example, the marker can be a truncated EGFR (tEGFR) that is, optionally, linked to a linker sequence, such as a T2A ribosomal skip sequence.

[0302] In some embodiments, the marker is a molecule, e.g., cell surface protein, not naturally found on T cells or not naturally found on the surface of T cells, or a portion thereof.

[0303] In some embodiments, the molecule is a non-self molecule, e.g., non-self protein, i.e., one that is not recognized as “self” by the immune system of the host into which the cells will be adoptively transferred.

[0304] In some embodiments, the marker serves no therapeutic function and/or produces no effect other than to be used as a marker for genetic engineering, e.g., for selecting cells successfully engineered. In other embodiments, the marker may be a therapeutic molecule or molecule otherwise exerting some desired effect, such as a ligand for a cell to be encountered in vivo, such as a costimulatory or immune checkpoint molecule to enhance and/or dampen responses of the cells upon adoptive transfer and encounter with ligand.

[0305] The TCR or CAR may comprise one or modified synthetic amino acids in place of one or more naturally-occurring amino acids. Exemplary modified amino acids include, but are not limited to, aminocyclohexane carboxylic acid, norleucine, α-amino n-decanoic acid, homoserine, S-acetylaminomethylcysteine, trans-3- and trans-4-hydroxyproline, 4-aminophenylalanine, 4-nitrophenylalanine, 4-chlorophenylalanine, 4-carboxyphenylalanine, (3-phenylserine (3-hydroxyphenylalanine, phenylglycine, α-naphthylalanine, cyclohexylalanine, cyclohexylglycine, indoline-2-carboxylic acid, 1,2,3,4-tetrahydroisoquinoline-3-carboxylic acid, aminomalonic acid, aminomalonic acid monoamide, N′-benzyl-N′-methyl-lysine, N′,N′-dibenzyl-lysine, 6-hydroxylysine, ornithine, α-aminocyclopentane carboxylic acid, α-aminocyclohexane carboxylic acid, α-aminocycloheptane carboxylic acid, α-(2-amino-2-norbomane)-carboxylic acid, α,γ-diaminobutyric acid, α,γ-diaminopropionic acid, homophenylalanine, and α-tertbutylglycine.

[0306] In some cases, CARs are referred to as first, second, and/or third generation CARs. In some aspects, a first generation CAR is one that solely provides a CD3-chain induced signal upon antigen binding; in some aspects, a second-generation CARs is one that provides such a signal and costimulatory signal, such as one including an intracellular signaling domain from a costimulatory receptor such as CD28 or CD137; in some aspects, a third generation CAR in some aspects is one that includes multiple costimulatory domains of different costimulatory receptors.

[0307] In some embodiments, the chimeric antigen receptor includes an extracellular portion containing an antibody or fragment described herein. In some aspects, the chimeric antigen receptor includes an extracellular portion containing an antibody or fragment described herein and an intracellular signaling domain. In some embodiments, an antibody or fragment includes an scFv or a single-domain VH antibody and the intracellular domain contains an ITAM. In some aspects, the intracellular signaling domain includes a signaling domain of a zeta chain of a CD3-zeta (CD3) chain. In some embodiments, the chimeric antigen receptor includes a transmembrane domain linking the extracellular domain and the intracellular signaling domain.

[0308] In some aspects, the transmembrane domain contains a transmembrane portion of CD28. The extracellular domain and transmembrane can be linked directly or indirectly. In some embodiments, the extracellular domain and transmembrane are linked by a spacer, such as any described herein. In some embodiments, the chimeric antigen receptor contains an intracellular domain of a T cell costimulatory molecule, such as between the transmembrane domain and intracellular signaling domain. In some aspects, the T cell costimulatory molecule is CD28 or 41BB.

[0309] In some embodiments, the CAR contains an antibody, e.g., an antibody fragment, a transmembrane domain that is or contains a transmembrane portion of CD28 or a functional variant thereof, and an intracellular signaling domain containing a signaling portion of CD28 or functional variant thereof and a signaling portion of CD3 zeta or functional variant thereof. In some embodiments, the CAR contains an antibody, e.g., antibody fragment, a transmembrane domain that is or contains a transmembrane portion of CD28 or a functional variant thereof, and an intracellular signaling domain containing a signaling portion of a 4-1BB or functional variant thereof and a signaling portion of CD3 zeta or functional variant thereof. In some such embodiments, the receptor further includes a spacer containing a portion of an Ig molecule, such as a human Ig molecule, such as an Ig hinge, e.g. an IgG4 hinge, such as a hinge-only spacer.

[0310] In some embodiments, the transmembrane domain of the receptor, e.g., the CAR, is a transmembrane domain of human CD28 or variant thereof, e.g., a 27-amino acid transmembrane domain of a human CD28 (Accession No.: P10747.1).

[0311] In some embodiments, the chimeric antigen receptor contains an intracellular domain of a T cell costimulatory molecule. In some aspects, the T cell costimulatory molecule is CD28 or 41BB.

[0312] In some embodiments, the intracellular signaling domain comprises an intracellular costimulatory signaling domain of human CD28 or functional variant or portion thereof, such as a 41 amino acid domain thereof and/or such a domain with an LL to GG substitution at positions 186-187 of a native CD28 protein. In some embodiments, the intracellular domain comprises an intracellular costimulatory signaling domain of 41BB or functional variant or portion thereof, such as a 42-amino acid cytoplasmic domain of a human 4-1BB (Accession No. Q07011.1) or functional variant or portion thereof.

[0313] In some embodiments, the intracellular signaling domain comprises a human CD3 zeta stimulatory signaling domain or functional variant thereof, such as a 112 AA cytoplasmic domain of isoform 3 of human CD3.zeta. (Accession No.: P20963.2) or a CD3 zeta signaling domain as described in U.S. Pat. No. 7,446,190 or 8,911,993.

[0314] In some aspects, the spacer contains only a hinge region of an IgG, such as only a hinge of IgG4 or IgG1. In other embodiments, the spacer is an Ig hinge, e.g., and IgG4 hinge, linked to a CH2 and/or CH3 domains. In some embodiments, the spacer is an Ig hinge, e.g., an IgG4 hinge, linked to CH2 and CH3 domains. In some embodiments, the spacer is an Ig hinge, e.g., an IgG4 hinge, linked to a CH3 domain only. In some embodiments, the spacer is or comprises a glycine-serine rich sequence or other flexible linker such as known flexible linkers.

[0315] For example, in some embodiments, the CAR includes an antibody or fragment thereof, such as any of the HLA-PEPTIDE antibodies, including sdAbs (e.g. containing only the VH region) and scFvs, described herein, a spacer such as any of the Ig-hinge containing spacers, a CD28 transmembrane domain, a CD28 intracellular signaling domain, and a CD3 zeta signaling domain. In some embodiments, the CAR includes an antibody or fragment, such as any of the HLA-PEPTIDE antibodies, including sdAbs and scFvs described herein, a spacer such as any of the Ig-hinge containing spacers, a CD28 transmembrane domain, a CD28 intracellular signaling domain, and a CD3 zeta signaling domain.

[0316] Target-Specific TCRs to a *02:01 LLASSILCA (SEQ ID NO: 2737) [G7]

[0317] In some aspects, provided herein are ABPs comprising TCRs or antigen-binding fragments thereof that specifically bind an HLA-PEPTIDE target, wherein the HLA Class I molecule of the HLA-PEPTIDE target is HLA subtype A*02:01 and the HLA-restricted peptide of the HLA-PEPTIDE target comprises the sequence LLASSILCA (SEQ ID NO: 2737) (“G7”).

[0318] The TCR specific for A*02:01_LLASSILCA (SEQ ID NO: 2737) may comprise an αCDR3 sequence. The αCDR3 sequence may be SEQ ID NO: 4277, 4278, 4279, 4280, or 4281.

[0319] The TCR specific for A*02:01_LLASSILCA (SEQ ID NO: 2737) may comprise a βCDR3 sequence. The βCDR3 sequence may be any one of SEQ ID NOS 4291-4295.

[0320] The TCR specific for A*02:01_LLASSILCA (SEQ ID NO: 2737) may comprise a particular αCDR3 sequence and a particular βCDR3 sequence. The αCDR3 may be SEQ ID NO: 4277 and the βCDR3 may be SEQ ID NO: 4291. The αCDR3 may be SEQ ID NO: 4278 and the βCDR3 may be SEQ ID NO: 4292. The αCDR3 may be SEQ ID NO: 4279 and the βCDR3 may be SEQ ID NO: 4293. The αCDR3 may be SEQ ID NO: 4280 and the βCDR3 may be SEQ ID NO: 4294. The αCDR3 may be SEQ ID NO: 4281 and the βCDR3 may be SEQ ID NO: 4295.

[0321] The TCR specific for A*02:01_LLASSILCA (SEQ ID NO: 2737) may comprise an αCDR3 that is SEQ ID NO: 4277 and a beta CDR 3 that is SEQ ID NO: 4291. The TCR specific for A*02:01_LLASSILCA (SEQ ID NO: 2737) may comprise an αCDR3 that is SEQ ID NO: 4278 and a beta CDR 3 that is SEQ ID NO: 4292. The TCR specific for A*02:01_LLASSILCA (SEQ ID NO: 2737) may comprise an αCDR3 that is SEQ ID NO: 4279 and a beta CDR 3 that is SEQ ID NO: 4293. The TCR specific for A*02:01_LLASSILCA (SEQ ID NO: 2737) may comprise an αCDR3 that is SEQ ID NO: 4280 and a beta CDR 3 that is SEQ ID NO: 4294. The TCR specific for A*02:01_LLASSILCA (SEQ ID NO: 2737) may comprise an αCDR3 that is SEQ ID NO: 4281 and a beta CDR 3 that is SEQ ID NO: 4295.

[0322] The TCR specific for A*02:01_LLASSILCA (SEQ ID NO: 2737) may comprise a TRAV, a TRAJ, a TRBV, optionally a TRBD, and a TRBJ amino acid sequence, optionally a TRAC sequence and optionally a TRBC sequence. Such TCR may comprise TRAV19, TRAJ4, TRBV6-5, TRBD2, and TRBJ2-7. Such TCR may comprise TRAV5, TRAJ13, TRBV7-9, TRBD1, and TRBJ2-7. Such TCR may comprise TRAV3, TRAJ39, TRBV7-9, and TRBJ2-2. Such TCR may comprise TRAV38-2DV8, TRAJ21, TRBV9, TRBD1, and TRBJ2-1. Such TCR may comprise TRAV4, TRAJ9, TRBV27, and TRBJ1-5.

[0323] The TCR specific for A*02:01_LLASSILCA (SEQ ID NO: 2737) may comprise an alpha VJ sequence. The alpha VJ sequence may be any one of SEQ ID NOS 4306-4310.

[0324] The TCR specific for A*02:01_LLASSILCA (SEQ ID NO: 2737) may comprise a beta V(D)J sequence. The beta V(D)J sequence may be any one of SEQ ID NOS 4321-4325.

[0325] In some embodiments, the alpha VJ sequence is SEQ ID NO: 4306 and the beta V(D)J sequence is SEQ ID NO: 4321. In some embodiments, the alpha VJ sequence is SEQ ID NO: 4307 and the beta V(D)J sequence is SEQ ID NO: 4322. In some embodiments, the alpha VJ sequence is SEQ ID NO: 4308 and the beta V(D)J sequence is SEQ ID NO: 4323. In some embodiments, the alpha VJ sequence is SEQ ID NO: 4309 and the beta V(D)J sequence is SEQ ID NO: 4324. In some embodiments, the alpha VJ sequence is SEQ ID NO: 4310 and the beta V(D)J sequence is SEQ ID NO: 4325.

[0326] Target-Specific TCRs to A*01:01 EVDPIGHLY (SEQ ID NO: 3051)

[0327] In some aspects, provided herein are ABPs comprising TCRs or antigen-binding fragments thereof that specifically bind an HLA-PEPTIDE target, wherein the HLA Class I molecule of the HLA-PEPTIDE target is HLA subtype A*01:01 and the HLA-restricted peptide of the HLA-PEPTIDE target comprises the sequence EVDPIGHLY (SEQ ID NO: 3051).

[0328] The TCR specific for A*01:01_EVDPIGHLY (SEQ ID NO: 3051) may comprise an αCDR3 sequence. The αCDR3 sequence may be any one of SEQ ID NOS 3052-3350 or 4273-4276.

[0329] The TCR specific for A*01:01_EVDPIGHLY (SEQ ID NO: 3051) may comprise a βCDR3 sequence. The βCDR3 sequence may be any one of SEQ ID NOS 3351-3655 or 4287-4290.

[0330] The TCR specific for A*01:01_EVDPIGHLY (SEQ ID NO: 3051) may comprise a particular αCDR3 sequence and a particular βCDR3 sequence. The αCDR3 may be SEQ ID NO: 4273 and the βCDR3 may be SEQ ID NO: 4287. The αCDR3 may be SEQ ID NO: 4274 and the βCDR3 may be SEQ ID NO: 4288. The αCDR3 may be SEQ ID NO: 4275 and the βCDR3 may be SEQ ID NO: 4289. The αCDR3 may be SEQ ID NO: 4276 and the βCDR3 may be SEQ ID NO: 4290. The αCDR3 may be SEQ ID NO: 3052 and the βCDR3 may be SEQ ID NO: 3351. The αCDR3 may be SEQ ID NO: 3053 and the βCDR3 may be SEQ ID NO: 3352. The αCDR3 may be SEQ ID NO: 3054 and the βCDR3 may be SEQ ID NO: 3353. The αCDR3 may be SEQ ID NO: 3052 and the βCDR3 may be SEQ ID NO: 3352. The αCDR3 may be SEQ ID NO: 3055 and the βCDR3 may be SEQ ID NO: 3354. The αCDR3 may be SEQ ID NO: 3056 and the βCDR3 may be SEQ ID NO: 3355. The αCDR3 may be SEQ ID NO: 3057 and the βCDR3 may be SEQ ID NO: 3356. The αCDR3 may be SEQ ID NO: 3058 and the βCDR3 may be SEQ ID NO: 3357. The αCDR3 may be SEQ ID NO: 3059 and the βCDR3 may be SEQ ID NO: 3358. The αCDR3 may be SEQ ID NO: 3060 and the βCDR3 may be SEQ ID NO: 3359. The αCDR3 may be SEQ ID NO: 3061 and the βCDR3 may be SEQ ID NO: 3360. The αCDR3 may be SEQ ID NO: 3062 and the βCDR3 may be SEQ ID NO: 3361. The αCDR3 may be SEQ ID NO: 3063 and the βCDR3 may be SEQ ID NO: 3362. The αCDR3 may be SEQ ID NO: 3053 and the βCDR3 may be SEQ ID NO: 3351. The αCDR3 may be SEQ ID NO: 3057 and the βCDR3 may be SEQ ID NO: 3352. The αCDR3 may be SEQ ID NO: 3064 and the βCDR3 may be SEQ ID NO: 3363. The αCDR3 may be SEQ ID NO: 3065 and the βCDR3 may be SEQ ID NO: 3364. The αCDR3 may be SEQ ID NO: 3054 and the βCDR3 may be SEQ ID NO: 3352. The αCDR3 may be SEQ ID NO: 3066 and the βCDR3 may be SEQ ID NO: 3365. The αCDR3 may be SEQ ID NO: 3067 and the βCDR3 may be SEQ ID NO: 3366. The αCDR3 may be SEQ ID NO: 3068 and the βCDR3 may be SEQ ID NO: 3367. The βCDR3 may be SEQ ID NO: 3069 and the βCDR3 may be SEQ ID NO: 3368. The αCDR3 may be SEQ ID NO: 3052 and the βCDR3 may be SEQ ID NO: 3356. The αCDR3 may be SEQ ID NO: 3070 and the βCDR3 may be SEQ ID NO: 3369. The αCDR3 may be SEQ ID NO: 3052 and the βCDR3 may be SEQ ID NO: 3355. The αCDR3 may be SEQ ID NO: 3071 and the βCDR3 may be SEQ ID NO: 3370. The αCDR3 may be SEQ ID NO: 3052 and the βCDR3 may be SEQ ID NO: 3353. The αCDR3 may be SEQ ID NO: 3072 and the βCDR3 may be SEQ ID NO: 3371. The αCDR3 may be SEQ ID NO: 3073 and the βCDR3 may be SEQ ID NO: 3372. The αCDR3 may be SEQ ID NO: 3057 and the βCDR3 may be SEQ ID NO: 3351. The αCDR3 may be SEQ ID NO: 3074 and the βCDR3 may be SEQ ID NO: 3373. The αCDR3 may be SEQ ID NO: 3075 and the βCDR3 may be SEQ ID NO: 3374. The αCDR3 may be SEQ ID NO: 3076 and the βCDR3 may be SEQ ID NO: 3375. The αCDR3 may be SEQ ID NO: 3077 and the βCDR3 may be SEQ ID NO: 3376. The αCDR3 may be SEQ ID NO: 3078 and the βCDR3 may be SEQ ID NO: 3377. The αCDR3 may be SEQ ID NO: 3079 and the βCDR3 may be SEQ ID NO: 3378. The αCDR3 may be SEQ ID NO: 3080 and the βCDR3 may be SEQ ID NO: 3379. The αCDR3 may be SEQ ID NO: 3081 and the βCDR3 may be SEQ ID NO: 3380. The αCDR3 may be SEQ ID NO: 3082 and the βCDR3 may be SEQ ID NO: 3381. The αCDR3 may be SEQ ID NO: 3083 and the βCDR3 may be SEQ ID NO: 3382. The αCDR3 may be SEQ ID NO: 3084 and the βCDR3 may be SEQ ID NO: 3383. The αCDR3 may be SEQ ID NO: 3085 and the βCDR3 may be SEQ ID NO: 3384. The αCDR3 may be SEQ ID NO: 3086 and the βCDR3 may be SEQ ID NO: 3385. The αCDR3 may be SEQ ID NO: 3087 and the βCDR3 may be SEQ ID NO: 3386. The αCDR3 may be SEQ ID NO: 3088 and the βCDR3 may be SEQ ID NO: 3387. The αCDR3 may be SEQ ID NO: 3089 and the βCDR3 may be SEQ ID NO: 3388. The αCDR3 may be SEQ ID NO: 3052 and the βCDR3 may be SEQ ID NO: 3389. The αCDR3 may be SEQ ID NO: 3056 and the βCDR3 may be SEQ ID NO: 3351. The αCDR3 may be SEQ ID NO: 3090 and the βCDR3 may be SEQ ID NO: 3390. The αCDR3 may be SEQ ID NO: 3091 and the βCDR3 may be SEQ ID NO: 3391. The αCDR3 may be SEQ ID NO: 3092 and the βCDR3 may be SEQ ID NO: 3392. The αCDR3 may be SEQ ID NO: 3093 and the βCDR3 may be SEQ ID NO: 3393. The αCDR3 may be SEQ ID NO: 3053 and the βCDR3 may be SEQ ID NO: 3356. The αCDR3 may be SEQ ID NO: 3094 and the βCDR3 may be SEQ ID NO: 3394. The αCDR3 may be SEQ ID NO: 3054 and the βCDR3 may be SEQ ID NO: 3363. The αCDR3 may be SEQ ID NO: 3095 and the βCDR3 may be SEQ ID NO: 3395. The αCDR3 may be SEQ ID NO: 3054 and the βCDR3 may be SEQ ID NO: 3351. The αCDR3 may be SEQ ID NO: 3096 and the βCDR3 may be SEQ ID NO: 3396. The αCDR3 may be SEQ ID NO: 3053 and the βCDR3 may be SEQ ID NO: 3355. The αCDR3 may be SEQ ID NO: 3097 and the βCDR3 may be SEQ ID NO: 3397. The αCDR3 may be SEQ ID NO: 3098 and the βCDR3 may be SEQ ID NO: 3398. The αCDR3 may be SEQ ID NO: 3099 and the βCDR3 may be SEQ ID NO: 3352. The αCDR3 may be SEQ ID NO: 3100 and the βCDR3 may be SEQ ID NO: 3399. The αCDR3 may be SEQ ID NO: 3053 and the βCDR3 may be SEQ ID NO: 3353. The αCDR3 may be SEQ ID NO: 3101 and the βCDR3 may be SEQ ID NO: 3400. The αCDR3 may be SEQ ID NO: 3102 and the βCDR3 may be SEQ ID NO: 3401. The αCDR3 may be SEQ ID NO: 3058 and the βCDR3 may be SEQ ID NO: 3352. The αCDR3 may be SEQ ID NO: 3103 and the βCDR3 may be SEQ ID NO: 3402. The αCDR3 may be SEQ ID NO: 3104 and the βCDR3 may be SEQ ID NO: 3403. The αCDR3 may be SEQ ID NO: 3105 and the βCDR3 may be SEQ ID NO: 3404. The αCDR3 may be SEQ ID NO: 3106 and the βCDR3 may be SEQ ID NO: 3405. The αCDR3 may be SEQ ID NO: 3107 and the βCDR3 may be SEQ ID NO: 3406. The αCDR3 may be SEQ ID NO: 3108 and the βCDR3 may be SEQ ID NO: 3407. The αCDR3 may be SEQ ID NO: 3109 and the βCDR3 may be SEQ ID NO: 3408. The αCDR3 may be SEQ ID NO: 3110 and the βCDR3 may be SEQ ID NO: 3409. The αCDR3 may be SEQ ID NO: 3111 and the βCDR3 may be SEQ ID NO: 3410. The αCDR3 may be SEQ ID NO: 3112 and the βCDR3 may be SEQ ID NO: 3411. The αCDR3 may be SEQ ID NO: 3113 and the βCDR3 may be SEQ ID NO: 3412. The αCDR3 may be SEQ ID NO: 3058 and the βCDR3 may be SEQ ID NO: 3351. The αCDR3 may be SEQ ID NO: 3052 and the βCDR3 may be SEQ ID NO: 3354. The αCDR3 may be SEQ ID NO: 3072 and the βCDR3 may be SEQ ID NO: 3353. The αCDR3 may be SEQ ID NO: 3052 and the βCDR3 may be SEQ ID NO: 3413. The αCDR3 may be SEQ ID NO: 3114 and the βCDR3 may be SEQ ID NO: 3414. The αCDR3 may be SEQ ID NO: 3058 and the βCDR3 may be SEQ ID NO: 3355. The αCDR3 may be SEQ ID NO: 3052 and the βCDR3 may be SEQ ID NO: 3415. The αCDR3 may be SEQ ID NO: 3114 and the βCDR3 may be SEQ ID NO: 3353. The αCDR3 may be SEQ ID NO: 3115 and the βCDR3 may be SEQ ID NO: 3416. The αCDR3 may be SEQ ID NO: 3116 and the βCDR3 may be SEQ ID NO: 3417. The αCDR3 may be SEQ ID NO: 3117 and the βCDR3 may be SEQ ID NO: 3418. The αCDR3 may be SEQ ID NO: 3118 and the βCDR3 may be SEQ ID NO: 3419. The αCDR3 may be SEQ ID NO: 3119 and the βCDR3 may be SEQ ID NO: 3420. The αCDR3 may be SEQ ID NO: 3120 and the βCDR3 may be SEQ ID NO: 3352. The αCDR3 may be SEQ ID NO: 3121 and the βCDR3 may be SEQ ID NO: 3421. The αCDR3 may be SEQ ID NO: 3054 and the βCDR3 may be SEQ ID NO: 3367. The αCDR3 may be SEQ ID NO: 3122 and the βCDR3 may be SEQ ID NO: 3422. The αCDR3 may be SEQ ID NO: 3123 and the βCDR3 may be SEQ ID NO: 3423. The αCDR3 may be SEQ ID NO: 3124 and the βCDR3 may be SEQ ID NO: 3424. The αCDR3 may be SEQ ID NO: 3112 and the βCDR3 may be SEQ ID NO: 3351. The αCDR3 may be SEQ ID NO: 3060 and the βCDR3 may be SEQ ID NO: 3352. The αCDR3 may be SEQ ID NO: 3059 and the βCDR3 may be SEQ ID NO: 3351. The αCDR3 may be SEQ ID NO: 3071 and the βCDR3 may be SEQ ID NO: 3355. The αCDR3 may be SEQ ID NO: 3125 and the βCDR3 may be SEQ ID NO: 3425. The αCDR3 may be SEQ ID NO: 3126 and the βCDR3 may be SEQ ID NO: 3426. The αCDR3 may be SEQ ID NO: 3127 and the βCDR3 may be SEQ ID NO: 3427. The αCDR3 may be SEQ ID NO: 3128 and the βCDR3 may be SEQ ID NO: 3428. The αCDR3 may be SEQ ID NO: 3129 and the βCDR3 may be SEQ ID NO: 3429. The αCDR3 may be SEQ ID NO: 3130 and the βCDR3 may be SEQ ID NO: 3352. The αCDR3 may be SEQ ID NO: 3052 and the βCDR3 may be SEQ ID NO: 3362. The αCDR3 may be SEQ ID NO: 3055 and the βCDR3 may be SEQ ID NO: 3352. The αCDR3 may be SEQ ID NO: 3131 and the βCDR3 may be SEQ ID NO: 3430. The αCDR3 may be SEQ ID NO: 3132 and the βCDR3 may be SEQ ID NO: 3431. The αCDR3 may be SEQ ID NO: 3133 and the βCDR3 may be SEQ ID NO: 3432. The αCDR3 may be SEQ ID NO: 3053 and the βCDR3 may be SEQ ID NO: 3381. The αCDR3 may be SEQ ID NO: 3134 and the βCDR3 may be SEQ ID NO: 3433. The αCDR3 may be SEQ ID NO: 3061 and the βCDR3 may be SEQ ID NO: 3351. The αCDR3 may be SEQ ID NO: 3104 and the βCDR3 may be SEQ ID NO: 3352. The αCDR3 may be SEQ ID NO: 3055 and the βCDR3 may be SEQ ID NO: 3351. The αCDR3 may be SEQ ID NO: 3058 and the βCDR3 may be SEQ ID NO: 3353. The αCDR3 may be SEQ ID NO: 3135 and the βCDR3 may be SEQ ID NO: 3434. The αCDR3 may be SEQ ID NO: 3052 and the βCDR3 may be SEQ ID NO: 3435. The αCDR3 may be SEQ ID NO: 3136 and the βCDR3 may be SEQ ID NO: 3436. The αCDR3 may be SEQ ID NO: 3137 and the βCDR3 may be SEQ ID NO: 3437. The αCDR3 may be SEQ ID NO: 3138 and the βCDR3 may be SEQ ID NO: 3438. The αCDR3 may be SEQ ID NO: 3139 and the βCDR3 may be SEQ ID NO: 3439. The αCDR3 may be SEQ ID NO: 3140 and the βCDR3 may be SEQ ID NO: 3440. The αCDR3 may be SEQ ID NO: 3141 and the βCDR3 may be SEQ ID NO: 3441. The αCDR3 may be SEQ ID NO: 3142 and the βCDR3 may be SEQ ID NO: 3442. The αCDR3 may be SEQ ID NO: 3143 and the βCDR3 may be SEQ ID NO: 3443. The αCDR3 may be SEQ ID NO: 3144 and the βCDR3 may be SEQ ID NO: 3444. The αCDR3 may be SEQ ID NO: 3145 and the βCDR3 may be SEQ ID NO: 3445. The αCDR3 may be SEQ ID NO: 3136 and the βCDR3 may be SEQ ID NO: 3444. The αCDR3 may be SEQ ID NO: 3146 and the βCDR3 may be SEQ ID NO: 3446. The αCDR3 may be SEQ ID NO: 3147 and the βCDR3 may be SEQ ID NO: 3447. The αCDR3 may be SEQ ID NO: 3148 and the βCDR3 may be SEQ ID NO: 3448. The αCDR3 may be SEQ ID NO: 3149 and the βCDR3 may be SEQ ID NO: 3449. The αCDR3 may be SEQ ID NO: 3150 and the βCDR3 may be SEQ ID NO: 3450. The αCDR3 may be SEQ ID NO: 3151 and the βCDR3 may be SEQ ID NO: 3436. The αCDR3 may be SEQ ID NO: 3139 and the βCDR3 may be SEQ ID NO: 3436. The αCDR3 may be SEQ ID NO: 3152 and the βCDR3 may be SEQ ID NO: 3451. The αCDR3 may be SEQ ID NO: 3153 and the βCDR3 may be SEQ ID NO: 3452. The αCDR3 may be SEQ ID NO: 3154 and the βCDR3 may be SEQ ID NO: 3453. The αCDR3 may be SEQ ID NO: 3155 and the βCDR3 may be SEQ ID NO: 3454. The αCDR3 may be SEQ ID NO: 3137 and the βCDR3 may be SEQ ID NO: 3440. The αCDR3 may be SEQ ID NO: 3156 and the βCDR3 may be SEQ ID NO: 3455. The αCDR3 may be SEQ ID NO: 3151 and the βCDR3 may be SEQ ID NO: 3456. The αCDR3 may be SEQ ID NO: 3157 and the βCDR3 may be SEQ ID NO: 3457. The αCDR3 may be SEQ ID NO: 3158 and the βCDR3 may be SEQ ID NO: 3458. The αCDR3 may be SEQ ID NO: 3159 and the βCDR3 may be SEQ ID NO: 3459. The αCDR3 may be SEQ ID NO: 3160 and the βCDR3 may be SEQ ID NO: 3460. The αCDR3 may be SEQ ID NO: 3077 and the βCDR3 may be SEQ ID NO: 3461. The αCDR3 may be SEQ ID NO: 3161 and the βCDR3 may be SEQ ID NO: 3462. The αCDR3 may be SEQ ID NO: 3162 and the βCDR3 may be SEQ ID NO: 3463. The αCDR3 may be SEQ ID NO: 3163 and the βCDR3 may be SEQ ID NO: 3464. The αCDR3 may be SEQ ID NO: 3164 and the βCDR3 may be SEQ ID NO: 3465. The αCDR3 may be SEQ ID NO: 3137 and the βCDR3 may be SEQ ID NO: 3442. The αCDR3 may be SEQ ID NO: 3136 and the βCDR3 may be SEQ ID NO: 3438. The αCDR3 may be SEQ ID NO: 3165 and the βCDR3 may be SEQ ID NO: 3466. The αCDR3 may be SEQ ID NO: 3166 and the βCDR3 may be SEQ ID NO: 3467. The αCDR3 may be SEQ ID NO: 3167 and the βCDR3 may be SEQ ID NO: 3468. The αCDR3 may be SEQ ID NO: 3168 and the βCDR3 may be SEQ ID NO: 3469. The αCDR3 may be SEQ ID NO: 3169 and the βCDR3 may be SEQ ID NO: 3470. The αCDR3 may be SEQ ID NO: 3137 and the βCDR3 may be SEQ ID NO: 3436. The αCDR3 may be SEQ ID NO: 3170 and the βCDR3 may be SEQ ID NO: 3471. The αCDR3 may be SEQ ID NO: 3171 and the βCDR3 may be SEQ ID NO: 3472. The αCDR3 may be SEQ ID NO: 3172 and the βCDR3 may be SEQ ID NO: 3473. The αCDR3 may be SEQ ID NO: 3173 and the βCDR3 may be SEQ ID NO: 3474. The αCDR3 may be SEQ ID NO: 3174 and the βCDR3 may be SEQ ID NO: 3475. The αCDR3 may be SEQ ID NO: 3175 and the βCDR3 may be SEQ ID NO: 3476. The αCDR3 may be SEQ ID NO: 3176 and the βCDR3 may be SEQ ID NO: 3477. The αCDR3 may be SEQ ID NO: 3177 and the βCDR3 may be SEQ ID NO: 3478. The αCDR3 may be SEQ ID NO: 3178 and the βCDR3 may be SEQ ID NO: 3479. The αCDR3 may be SEQ ID NO: 3179 and the βCDR3 may be SEQ ID NO: 3480. The αCDR3 may be SEQ ID NO: 3180 and the βCDR3 may be SEQ ID NO: 3481. The αCDR3 may be SEQ ID NO: 3136 and the βCDR3 may be SEQ ID NO: 3482. The αCDR3 may be SEQ ID NO: 3181 and the βCDR3 may be SEQ ID NO: 3483. The αCDR3 may be SEQ ID NO: 3182 and the βCDR3 may be SEQ ID NO: 3484. The αCDR3 may be SEQ ID NO: 3183 and the βCDR3 may be SEQ ID NO: 3485. The αCDR3 may be SEQ ID NO: 3184 and the βCDR3 may be SEQ ID NO: 3486. The αCDR3 may be SEQ ID NO: 3185 and the βCDR3 may be SEQ ID NO: 3487. The αCDR3 may be SEQ ID NO: 3186 and the βCDR3 may be SEQ ID NO: 3488. The αCDR3 may be SEQ ID NO: 3187 and the βCDR3 may be SEQ ID NO: 3489. The αCDR3 may be SEQ ID NO: 3188 and the βCDR3 may be SEQ ID NO: 3482. The αCDR3 may be SEQ ID NO: 3189 and the βCDR3 may be SEQ ID NO: 3490. The αCDR3 may be SEQ ID NO: 3190 and the βCDR3 may be SEQ ID NO: 3491. The αCDR3 may be SEQ ID NO: 3191 and the βCDR3 may be SEQ ID NO: 3492. The αCDR3 may be SEQ ID NO: 3192 and the βCDR3 may be SEQ ID NO: 3493. The αCDR3 may be SEQ ID NO: 3193 and the βCDR3 may be SEQ ID NO: 3494. The αCDR3 may be SEQ ID NO: 3194 and the βCDR3 may be SEQ ID NO: 3495. The αCDR3 may be SEQ ID NO: 3195 and the βCDR3 may be SEQ ID NO: 3496. The αCDR3 may be SEQ ID NO: 3196 and the βCDR3 may be SEQ ID NO: 3497. The αCDR3 may be SEQ ID NO: 3197 and the βCDR3 may be SEQ ID NO: 3498. The αCDR3 may be SEQ ID NO: 3198 and the βCDR3 may be SEQ ID NO: 3499. The αCDR3 may be SEQ ID NO: 3199 and the βCDR3 may be SEQ ID NO: 3500. The αCDR3 may be SEQ ID NO: 3137 and the βCDR3 may be SEQ ID NO: 3449. The αCDR3 may be SEQ ID NO: 3200 and the βCDR3 may be SEQ ID NO: 3436. The αCDR3 may be SEQ ID NO: 3201 and the βCDR3 may be SEQ ID NO: 3501. The αCDR3 may be SEQ ID NO: 3138 and the βCDR3 may be SEQ ID NO: 3436. The αCDR3 may be SEQ ID NO: 3202 and the βCDR3 may be SEQ ID NO: 3502. The αCDR3 may be SEQ ID NO: 3203 and the βCDR3 may be SEQ ID NO: 3503. The αCDR3 may be SEQ ID NO: 3204 and the βCDR3 may be SEQ ID NO: 3504. The αCDR3 may be SEQ ID NO: 3205 and the βCDR3 may be SEQ ID NO: 3505. The αCDR3 may be SEQ ID NO: 3206 and the βCDR3 may be SEQ ID NO: 3506. The αCDR3 may be SEQ ID NO: 3207 and the βCDR3 may be SEQ ID NO: 3507. The αCDR3 may be SEQ ID NO: 3148 and the βCDR3 may be SEQ ID NO: 3440. The αCDR3 may be SEQ ID NO: 3208 and the βCDR3 may be SEQ ID NO: 3508. The αCDR3 may be SEQ ID NO: 3209 and the βCDR3 may be SEQ ID NO: 3509. The αCDR3 may be SEQ ID NO: 3210 and the βCDR3 may be SEQ ID NO: 3510. The αCDR3 may be SEQ ID NO: 3211 and the βCDR3 may be SEQ ID NO: 3511. The αCDR3 may be SEQ ID NO: 3212 and the βCDR3 may be SEQ ID NO: 3512. The αCDR3 may be SEQ ID NO: 3213 and the βCDR3 may be SEQ ID NO: 3513. The αCDR3 may be SEQ ID NO: 3214 and the βCDR3 may be SEQ ID NO: 3514. The αCDR3 may be SEQ ID NO: 3215 and the βCDR3 may be SEQ ID NO: 3515. The αCDR3 may be SEQ ID NO: 3216 and the βCDR3 may be SEQ ID NO: 3516. The αCDR3 may be SEQ ID NO: 3217 and the βCDR3 may be SEQ ID NO: 3517. The αCDR3 may be SEQ ID NO: 3218 and the βCDR3 may be SEQ ID NO: 3518. The αCDR3 may be SEQ ID NO: 3219 and the βCDR3 may be SEQ ID NO: 3519. The αCDR3 may be SEQ ID NO: 3220 and the βCDR3 may be SEQ ID NO: 3520. The αCDR3 may be SEQ ID NO: 3221 and the βCDR3 may be SEQ ID NO: 3521. The αCDR3 may be SEQ ID NO: 3217 and the βCDR3 may be SEQ ID NO: 3518. The αCDR3 may be SEQ ID NO: 3222 and the βCDR3 may be SEQ ID NO: 3522. The αCDR3 may be SEQ ID NO: 3223 and the βCDR3 may be SEQ ID NO: 3523. The αCDR3 may be SEQ ID NO: 3224 and the βCDR3 may be SEQ ID NO: 3524. The αCDR3 may be SEQ ID NO: 3225 and the βCDR3 may be SEQ ID NO: 3525. The αCDR3 may be SEQ ID NO: 3226 and the βCDR3 may be SEQ ID NO: 3526. The αCDR3 may be SEQ ID NO: 3227 and the βCDR3 may be SEQ ID NO: 3527. The αCDR3 may be SEQ ID NO: 3228 and the βCDR3 may be SEQ ID NO: 3528. The αCDR3 may be SEQ ID NO: 3229 and the βCDR3 may be SEQ ID NO: 3529. The αCDR3 may be SEQ ID NO: 3230 and the βCDR3 may be SEQ ID NO: 3530. The αCDR3 may be SEQ ID NO: 3217 and the βCDR3 may be SEQ ID NO: 3525. The αCDR3 may be SEQ ID NO: 3231 and the βCDR3 may be SEQ ID NO: 3531. The αCDR3 may be SEQ ID NO: 3232 and the βCDR3 may be SEQ ID NO: 3532. The αCDR3 may be SEQ ID NO: 3233 and the βCDR3 may be SEQ ID NO: 3520. The αCDR3 may be SEQ ID NO: 3217 and the βCDR3 may be SEQ ID NO: 3530. The αCDR3 may be SEQ ID NO: 3234 and the βCDR3 may be SEQ ID NO: 3533. The αCDR3 may be SEQ ID NO: 3235 and the βCDR3 may be SEQ ID NO: 3534. The αCDR3 may be SEQ ID NO: 3217 and the βCDR3 may be SEQ ID NO: 3532. The αCDR3 may be SEQ ID NO: 3236 and the βCDR3 may be SEQ ID NO: 3535. The αCDR3 may be SEQ ID NO: 3237 and the βCDR3 may be SEQ ID NO: 3536. The αCDR3 may be SEQ ID NO: 3238 and the βCDR3 may be SEQ ID NO: 3537. The αCDR3 may be SEQ ID NO: 3239 and the βCDR3 may be SEQ ID NO: 3538. The αCDR3 may be SEQ ID NO: 3240 and the βCDR3 may be SEQ ID NO: 3539. The αCDR3 may be SEQ ID NO: 3241 and the βCDR3 may be SEQ ID NO: 3540. The αCDR3 may be SEQ ID NO: 3242 and the βCDR3 may be SEQ ID NO: 3541. The αCDR3 may be SEQ ID NO: 3243 and the βCDR3 may be SEQ ID NO: 3542. The αCDR3 may be SEQ ID NO: 3244 and the βCDR3 may be SEQ ID NO: 3543. The αCDR3 may be SEQ ID NO: 3245 and the βCDR3 may be SEQ ID NO: 3544. The αCDR3 may be SEQ ID NO: 3246 and the βCDR3 may be SEQ ID NO: 3545. The αCDR3 may be SEQ ID NO: 3247 and the βCDR3 may be SEQ ID NO: 3546. The αCDR3 may be SEQ ID NO: 3248 and the βCDR3 may be SEQ ID NO: 3547. The αCDR3 may be SEQ ID NO: 3249 and the βCDR3 may be SEQ ID NO: 3548. The αCDR3 may be SEQ ID NO: 3217 and the βCDR3 may be SEQ ID NO: 3524. The αCDR3 may be SEQ ID NO: 3250 and the βCDR3 may be SEQ ID NO: 3549. The αCDR3 may be SEQ ID NO: 3251 and the βCDR3 may be SEQ ID NO: 3550. The αCDR3 may be SEQ ID NO: 3252 and the βCDR3 may be SEQ ID NO: 3551. The αCDR3 may be SEQ ID NO: 3253 and the βCDR3 may be SEQ ID NO: 3552. The αCDR3 may be SEQ ID NO: 3254 and the βCDR3 may be SEQ ID NO: 3553. The αCDR3 may be SEQ ID NO: 3255 and the βCDR3 may be SEQ ID NO: 3554. The αCDR3 may be SEQ ID NO: 3256 and the βCDR3 may be SEQ ID NO: 3555. The αCDR3 may be SEQ ID NO: 3257 and the βCDR3 may be SEQ ID NO: 3556. The αCDR3 may be SEQ ID NO: 3258 and the βCDR3 may be SEQ ID NO: 3557. The αCDR3 may be SEQ ID NO: 3259 and the βCDR3 may be SEQ ID NO: 3558. The αCDR3 may be SEQ ID NO: 3260 and the βCDR3 may be SEQ ID NO: 3559. The αCDR3 may be SEQ ID NO: 3261 and the βCDR3 may be SEQ ID NO: 3560. The αCDR3 may be SEQ ID NO: 3217 and the βCDR3 may be SEQ ID NO: 3519. The αCDR3 may be SEQ ID NO: 3262 and the βCDR3 may be SEQ ID NO: 3561. The αCDR3 may be SEQ ID NO: 3263 and the βCDR3 may be SEQ ID NO: 3562. The αCDR3 may be SEQ ID NO: 3217 and the βCDR3 may be SEQ ID NO: 3563. The αCDR3 may be SEQ ID NO: 3264 and the βCDR3 may be SEQ ID NO: 3564. The αCDR3 may be SEQ ID NO: 3265 and the βCDR3 may be SEQ ID NO: 3565. The αCDR3 may be SEQ ID NO: 3266 and the βCDR3 may be SEQ ID NO: 3566. The αCDR3 may be SEQ ID NO: 3267 and the βCDR3 may be SEQ ID NO: 3567. The αCDR3 may be SEQ ID NO: 3268 and the βCDR3 may be SEQ ID NO: 3568. The αCDR3 may be SEQ ID NO: 3269 and the βCDR3 may be SEQ ID NO: 3569. The αCDR3 may be SEQ ID NO: 3217 and the βCDR3 may be SEQ ID NO: 3528. The αCDR3 may be SEQ ID NO: 3270 and the βCDR3 may be SEQ ID NO: 3570. The αCDR3 may be SEQ ID NO: 3217 and the βCDR3 may be SEQ ID NO: 3571. The αCDR3 may be SEQ ID NO: 3271 and the βCDR3 may be SEQ ID NO: 3572. The αCDR3 may be SEQ ID NO: 3219 and the βCDR3 may be SEQ ID NO: 3522. The αCDR3 may be SEQ ID NO: 3272 and the βCDR3 may be SEQ ID NO: 3573. The αCDR3 may be SEQ ID NO: 3273 and the βCDR3 may be SEQ ID NO: 3574. The αCDR3 may be SEQ ID NO: 3274 and the βCDR3 may be SEQ ID NO: 3575. The αCDR3 may be SEQ ID NO: 3275 and the βCDR3 may be SEQ ID NO: 3576. The αCDR3 may be SEQ ID NO: 3217 and the βCDR3 may be SEQ ID NO: 3577. The αCDR3 may be SEQ ID NO: 3230 and the βCDR3 may be SEQ ID NO: 3517. The αCDR3 may be SEQ ID NO: 3276 and the βCDR3 may be SEQ ID NO: 3578. The αCDR3 may be SEQ ID NO: 3277 and the βCDR3 may be SEQ ID NO: 3579. The αCDR3 may be SEQ ID NO: 3278 and the βCDR3 may be SEQ ID NO: 3580. The αCDR3 may be SEQ ID NO: 3279 and the βCDR3 may be SEQ ID NO: 3581. The αCDR3 may be SEQ ID NO: 3280 and the βCDR3 may be SEQ ID NO: 3582. The αCDR3 may be SEQ ID NO: 3281 and the βCDR3 may be SEQ ID NO: 3583. The αCDR3 may be SEQ ID NO: 3282 and the βCDR3 may be SEQ ID NO: 3584. The αCDR3 may be SEQ ID NO: 3283 and the βCDR3 may be SEQ ID NO: 3585. The αCDR3 may be SEQ ID NO: 3284 and the βCDR3 may be SEQ ID NO: 3586. The αCDR3 may be SEQ ID NO: 3285 and the βCDR3 may be SEQ ID NO: 3587. The αCDR3 may be SEQ ID NO: 3286 and the βCDR3 may be SEQ ID NO: 3588. The αCDR3 may be SEQ ID NO: 3287 and the βCDR3 may be SEQ ID NO: 3589. The αCDR3 may be SEQ ID NO: 3288 and the βCDR3 may be SEQ ID NO: 3590. The αCDR3 may be SEQ ID NO: 3289 and the βCDR3 may be SEQ ID NO: 3591. The αCDR3 may be SEQ ID NO: 3290 and the βCDR3 may be SEQ ID NO: 3592. The αCDR3 may be SEQ ID NO: 3291 and the βCDR3 may be SEQ ID NO: 3593. The αCDR3 may be SEQ ID NO: 3292 and the βCDR3 may be SEQ ID NO: 3594. The αCDR3 may be SEQ ID NO: 3293 and the βCDR3 may be SEQ ID NO: 3595. The αCDR3 may be SEQ ID NO: 3294 and the βCDR3 may be SEQ ID NO: 3596. The αCDR3 may be SEQ ID NO: 3295 and the βCDR3 may be SEQ ID NO: 3597. The αCDR3 may be SEQ ID NO: 3219 and the βCDR3 may be SEQ ID NO: 3598. The αCDR3 may be SEQ ID NO: 3296 and the βCDR3 may be SEQ ID NO: 3599. The αCDR3 may be SEQ ID NO: 3217 and the βCDR3 may be SEQ ID NO: 3600. The αCDR3 may be SEQ ID NO: 3297 and the βCDR3 may be SEQ ID NO: 3601. The αCDR3 may be SEQ ID NO: 3298 and the βCDR3 may be SEQ ID NO: 3602. The αCDR3 may be SEQ ID NO: 3299 and the βCDR3 may be SEQ ID NO: 3603. The αCDR3 may be SEQ ID NO: 3300 and the βCDR3 may be SEQ ID NO: 3604. The αCDR3 may be SEQ ID NO: 3301 and the βCDR3 may be SEQ ID NO: 3605. The αCDR3 may be SEQ ID NO: 3302 and the βCDR3 may be SEQ ID NO: 3606. The αCDR3 may be SEQ ID NO: 3303 and the βCDR3 may be SEQ ID NO: 3607. The αCDR3 may be SEQ ID NO: 3304 and the βCDR3 may be SEQ ID NO: 3608. The αCDR3 may be SEQ ID NO: 3305 and the βCDR3 may be SEQ ID NO: 3609. The αCDR3 may be SEQ ID NO: 3306 and the βCDR3 may be SEQ ID NO: 3610. The αCDR3 may be SEQ ID NO: 3307 and the βCDR3 may be SEQ ID NO: 3611. The αCDR3 may be SEQ ID NO: 3289 and the βCDR3 may be SEQ ID NO: 3595. The αCDR3 may be SEQ ID NO: 3308 and the βCDR3 may be SEQ ID NO: 3612. The αCDR3 may be SEQ ID NO: 3309 and the βCDR3 may be SEQ ID NO: 3613. The αCDR3 may be SEQ ID NO: 3310 and the βCDR3 may be SEQ ID NO: 3614. The αCDR3 may be SEQ ID NO: 3311 and the βCDR3 may be SEQ ID NO: 3615. The αCDR3 may be SEQ ID NO: 3312 and the βCDR3 may be SEQ ID NO: 3616. The αCDR3 may be SEQ ID NO: 3313 and the βCDR3 may be SEQ ID NO: 3617. The αCDR3 may be SEQ ID NO: 3314 and the βCDR3 may be SEQ ID NO: 3618. The αCDR3 may be SEQ ID NO: 3289 and the βCDR3 may be SEQ ID NO: 3619. The αCDR3 may be SEQ ID NO: 3315 and the βCDR3 may be SEQ ID NO: 3620. The αCDR3 may be SEQ ID NO: 3316 and the βCDR3 may be SEQ ID NO: 3621. The αCDR3 may be SEQ ID NO: 3317 and the βCDR3 may be SEQ ID NO: 3622. The αCDR3 may be SEQ ID NO: 3318 and the βCDR3 may be SEQ ID NO: 3623. The αCDR3 may be SEQ ID NO: 3319 and the βCDR3 may be SEQ ID NO: 3624. The αCDR3 may be SEQ ID NO: 3320 and the βCDR3 may be SEQ ID NO: 3625. The αCDR3 may be SEQ ID NO: 3321 and the βCDR3 may be SEQ ID NO: 3626. The αCDR3 may be SEQ ID NO: 3322 and the βCDR3 may be SEQ ID NO: 3627. The αCDR3 may be SEQ ID NO: 3323 and the βCDR3 may be SEQ ID NO: 3628. The αCDR3 may be SEQ ID NO: 3324 and the βCDR3 may be SEQ ID NO: 3629. The αCDR3 may be SEQ ID NO: 3325 and the βCDR3 may be SEQ ID NO: 3602. The αCDR3 may be SEQ ID NO: 3326 and the βCDR3 may be SEQ ID NO: 3630. The αCDR3 may be SEQ ID NO: 3327 and the βCDR3 may be SEQ ID NO: 3631. The αCDR3 may be SEQ ID NO: 3328 and the βCDR3 may be SEQ ID NO: 3632. The αCDR3 may be SEQ ID NO: 3289 and the βCDR3 may be SEQ ID NO: 3598. The αCDR3 may be SEQ ID NO: 3329 and the βCDR3 may be SEQ ID NO: 3633. The αCDR3 may be SEQ ID NO: 3330 and the βCDR3 may be SEQ ID NO: 3634. The αCDR3 may be SEQ ID NO: 3331 and the βCDR3 may be SEQ ID NO: 3635. The αCDR3 may be SEQ ID NO: 3332 and the βCDR3 may be SEQ ID NO: 3636. The αCDR3 may be SEQ ID NO: 3333 and the βCDR3 may be SEQ ID NO: 3637. The αCDR3 may be SEQ ID NO: 3334 and the βCDR3 may be SEQ ID NO: 3638. The αCDR3 may be SEQ ID NO: 3335 and the βCDR3 may be SEQ ID NO: 3639. The αCDR3 may be SEQ ID NO: 3336 and the βCDR3 may be SEQ ID NO: 3640. The αCDR3 may be SEQ ID NO: 3337 and the βCDR3 may be SEQ ID NO: 3641. The αCDR3 may be SEQ ID NO: 3338 and the βCDR3 may be SEQ ID NO: 3642. The αCDR3 may be SEQ ID NO: 3290 and the βCDR3 may be SEQ ID NO: 3596. The αCDR3 may be SEQ ID NO: 3339 and the βCDR3 may be SEQ ID NO: 3643. The αCDR3 may be SEQ ID NO: 3290 and the βCDR3 may be SEQ ID NO: 3601. The αCDR3 may be SEQ ID NO: 3340 and the βCDR3 may be SEQ ID NO: 3644. The αCDR3 may be SEQ ID NO: 3289 and the βCDR3 may be SEQ ID NO: 3611. The αCDR3 may be SEQ ID NO: 3341 and the βCDR3 may be SEQ ID NO: 3645. The αCDR3 may be SEQ ID NO: 3342 and the βCDR3 may be SEQ ID NO: 3646. The αCDR3 may be SEQ ID NO: 3343 and the βCDR3 may be SEQ ID NO: 3647. The αCDR3 may be SEQ ID NO: 3142 and the βCDR3 may be SEQ ID NO: 3648. The αCDR3 may be SEQ ID NO: 3344 and the βCDR3 may be SEQ ID NO: 3649. The αCDR3 may be SEQ ID NO: 3345 and the βCDR3 may be SEQ ID NO: 3650. The αCDR3 may be SEQ ID NO: 3290 and the βCDR3 may be SEQ ID NO: 3614. The αCDR3 may be SEQ ID NO: 3346 and the βCDR3 may be SEQ ID NO: 3651. The αCDR3 may be SEQ ID NO: 3347 and the βCDR3 may be SEQ ID NO: 3652. The αCDR3 may be SEQ ID NO: 3348 and the βCDR3 may be SEQ ID NO: 3653. The αCDR3 may be SEQ ID NO: 3349 and the βCDR3 may be SEQ ID NO: 3654. The αCDR3 may be SEQ ID NO: 3350 and the βCDR3 may be SEQ ID NO: 3655.

[0331] The TCR specific for A*01:01_EVDPIGHLY (SEQ ID NO: 3051) may comprise a TRAV, a TRAJ, a TRBV, optionally a TRBD, and a TRBJ amino acid sequence, optionally a TRAC sequence and optionally a TRBC sequence. Such TCR may comprise TRAV24, TRAJ31, TRBV3-1, TRBD1, and TRBJ2-1. Such TCR may comprise TRAV3, TRAJ6, TRBV19, and TRBJ2-1. Such TCR may comprise TRAV21, TRAJ26, TRBV27, TRBD1, and TRBJ1-6. Such TCR may comprise TRAV20, TRAJ15, TRBV27, and TRBJ2-3. Such TCR may comprise TRAV12-3, TRAJ20, TRBV20-1, TRBD2, and TRBJ1-2. Such TCR may comprise TRAV19, TRAJ40, TRBV20-1, TRBD1, and TRBJ2-7. Such TCR may comprise TRAV21, TRAJ4, TRBV10-3, and TRBJ1-1. Such TCR may comprise TRAV12-3, TRAJ20, TRBV20-1, TRBD1, and TRBJ2-7. Such TCR may comprise TRAV1-1, TRAJ4, TRBV9, TRBD1, and TRBJ1-1. Such TCR may comprise TRAV12-1, TRAJ17, TRBV6-1, TRBD2, and TRBJ2-1. Such TCR may comprise TRAV4, TRAJ47, TRBV20-1, TRBD2, and TRBJ2-3. Such TCR may comprise TRAV21, TRAJ6, TRBV5-4, and TRBJ2-1. Such TCR may comprise TRAV12-1, TRAJ11, TRBV11-3, TRBD1, and TRBJ1-1. Such TCR may comprise TRAV21, TRAJ31, TRBV5-1, TRBD1, and TRBJ1-1. Such TCR may comprise TRAV21, TRAJ33, TRBV5-1, TRBD1, and TRBJ2-3. Such TCR may comprise TRAV34, TRAJ40, TRBV9, TRBD2, and TRBJ2-7. Such TCR may comprise TRAV29DV5, TRAJ29, TRBV7-9, TRBD1, and TRBJ2-3. Such TCR may comprise TRAV19, TRAJ40, TRBV20-1, TRBD2, and TRBJ1-2. Such TCR may comprise TRAV4, TRAJ47, TRBV20-1, TRBD1, and TRBJ2-7. Such TCR may comprise TRAV21, TRAJ54, TRBV5-1, TRBD1, and TRBJ2-1. Such TCR may comprise TRAV21, TRAJ42, TRBV7-9, TRBD1, and TRBJ2-7. Such TCR may comprise TRAV21, TRAJ4, TRBV20-1, TRBD1, and TRBJ2-7. Such TCR may comprise TRAV21, TRAJ40, TRBV29-1, and TRBJ2-2. Such TCR may comprise TRAV29DV5, TRAJ49, TRBV10-2, TRBD1, and TRBJ2-7. Such TCR may comprise TRAV21, TRAJ40, TRBV27, TRBD2, and TRBJ2-2. Such TCR may comprise TRAV21, TRAJ11, TRBV5-4, and TRBJ2-2. Such TCR may comprise TRAV12-3, TRAJ20, TRBV20-1, TRBD2, and TRBJ2-3. Such TCR may comprise TRAV26-2, TRAJ49, TRBV19, and TRBJ1-5. Such TCR may comprise TRAV12-3, TRAJ20, TRBV6-1, TRBD2, and TRBJ2-1. Such TCR may comprise TRAV17, TRAJ34, TRBV11-1, TRBD1, and TRBJ1-2. Such TCR may comprise TRAV12-3, TRAJ20, TRBV10-3, and TRBJ1-1. Such TCR may comprise TRAV21, TRAJ26, TRBV5-6, TRBD1, and TRBJ2-7. Such TCR may comprise TRAV29DV5, TRAJ4, TRBV27, TRBD1, and TRBJ1-5. Such TCR may comprise TRAV4, TRAJ47, TRBV20-1, TRBD2, and TRBJ1-2. Such TCR may comprise TRAV13-1, TRAJ49, TRBV27, TRBD1, and TRBJ2-7. Such TCR may comprise TRAV12-1, TRAJ10, TRBV25-1, TRBD1, and TRBJ2-7. Such TCR may comprise TRAV29DV5, TRAJ39, TRBV7-9, and TRBJ2-7. Such TCR may comprise TRAV21, TRAJ47, TRBV9, TRBD1, and TRBJ1-1. Such TCR may comprise TRAV39, TRAJ41, TRBV13, and TRBJ1-4. Such TCR may comprise TRAV17, TRAJ53, TRBV29-1, TRBD1, and TRBJ2-1. Such TCR may comprise TRAV26-1, TRAJ42, TRBV19, TRBD1, and TRBJ2-3. Such TCR may comprise TRAV8-6, TRAJ50, TRBV9, TRBD1, and TRBJ2-7. Such TCR may comprise TRAV19, TRAJ10, TRBV7-9, and TRBJ2-7. Such TCR may comprise TRAV8-4, TRAJ42, TRBV3-1, TRBD2, and TRBJ2-1. Such TCR may comprise TRAV12-1, TRAJ47, TRBV5-8, TRBD1, and TRBJ1-1. Such TCR may comprise TRAV29DV5, TRAJ42, TRBV10-3, and TRBJ2-7. Such TCR may comprise TRAV13-2, TRAJ20, TRBV27, TRBD2, and TRBJ1-1. Such TCR may comprise TRAV10, TRAJ9, TRBV3-1, TRBD1, and TRBJ1-3. Such TCR may comprise TRAV19, TRAJ27, TRBV27, TRBD1, and TRBJ2-7. Such TCR may comprise TRAV9-2, TRAJ20, TRBV12-4, TRBD1, and TRBJ2-1. Such TCR may comprise TRAV12-2, TRAJ20, TRBV7-6, TRBD2, and TRBJ2-1. Such TCR may comprise TRAV12-1, TRAJ17, TRBV20-1, TRBD2, and TRBJ1-2. Such TCR may comprise TRAV30, TRAJ58, TRBV19, and TRBJ2-7. Such TCR may comprise TRAV8-1, TRAJ43, TRBV7-8, TRBD2, and TRBJ2-1. Such TCR may comprise TRAV13-1, TRAJ9, TRBV9, TRBD1, and TRBJ2-5. Such TCR may comprise TRAV12-1, TRAJ29, TRBV6-1, TRBD1, and TRBJ1-2. Such TCR may comprise TRAV19, TRAJ40, TRBV20-1, TRBD2, and TRBJ2-3. Such TCR may comprise TRAV21, TRAJ43, TRBV7-3, and TRBJ2-2. Such TCR may comprise TRAV21, TRAJ4, TRBV5-1, TRBD1, and TRBJ2-1. Such TCR may comprise TRAV26-2, TRAJ32, TRBV24-1, TRBD1, and TRBJ2-2. Such TCR may comprise TRAV21, TRAJ4, TRBV20-1, TRBD2, and TRBJ1-2. Such TCR may comprise TRAV19, TRAJ15, TRBV7-8, TRBD1, and TRBJ2-7. Such TCR may comprise TRAV19, TRAJ40, TRBV6-1, TRBD2, and TRBJ2-1. Such TCR may comprise TRAV12-2, TRAJ13, TRBV25-1, and TRBJ2-7. Such TCR may comprise TRAV29DV5, TRAJ54, TRBV7-8, and TRBJ2-1. Such TCR may comprise TRAV19, TRAJ53, TRBV20-1, TRBD1, and TRBJ2-7. Such TCR may comprise TRAV23DV6, TRAJ36, TRBV9, TRBD2, and TRBJ1-2. Such TCR may comprise TRAV19, TRAJ40, TRBV10-3, and TRBJ1-1. Such TCR may comprise TRAV8-6, TRAJ32, TRBV19, TRBD1, and TRBJ1-1. Such TCR may comprise TRAV1-1, TRAJ13, TRBV14, TRBD1, and TRBJ2-1. Such TCR may comprise TRAV21, TRAJ6, TRBV20-1, TRBD1, and TRBJ2-7. Such TCR may comprise TRAV21, TRAJ44, TRBV9, and TRBJ2-7. Such TCR may comprise TRAV29DV5, TRAJ3, TRBV3-1, TRBD2, and TRBJ2-5. Such TCR may comprise TRAV17, TRAJ39, TRBV7-2, and TRBJ1-2. Such TCR may comprise TRAV26-2, TRAJ12, TRBV7-9, TRBD1, and TRBJ1-2. Such TCR may comprise TRAV29DV5, TRAJ22, TRBV11-3, TRBD1, and TRBJ2-7. Such TCR may comprise TRAV21, TRAJ20, TRBV12-4, TRBD2, and TRBJ2-3. Such TCR may comprise TRAV12-3, TRAJ3, TRBV27, TRBD1, and TRBJ2-7. Such TCR may comprise TRAV27, TRAJ33, TRBV6-5, TRBD2, and TRBJ2-2. Such TCR may comprise TRAV13-1, TRAJ22, TRBV12-4, TRBD1, and TRBJ2-3. Such TCR may comprise TRAV26-1, TRAJ34, TRBV27, and TRBJ1-2. Such TCR may comprise TRAV10, TRAJ4, TRBV7-9, TRBD1, and TRBJ2-4. Such TCR may comprise TRAV21, TRAJ6, TRBV20-1, TRBD2, and TRBJ1-2. Such TCR may comprise TRAV12-3, TRAJ20, TRBV9, TRBD1, and TRBJ1-1. Such TCR may comprise TRAV21, TRAJ26, TRBV10-3, and TRBJ1-1. Such TCR may comprise TRAV12-2, TRAJ20, TRBV18, TRBD1, and TRBJ2-7. Such TCR may comprise TRAV9-2, TRAJ23, TRBV11-3, TRBD1, and TRBJ1-1. Such TCR may comprise TRAV21, TRAJ6, TRBV6-1, TRBD2, and TRBJ2-1. Such TCR may comprise TRAV12-3, TRAJ20, TRBV7-8, TRBD1, and TRBJ2-2. Such TCR may comprise TRAV9-2, TRAJ23, TRBV10-3, and TRBJ1-1. Such TCR may comprise TRAV24, TRAJ45, TRBV5-4, TRBD1, and TRBJ1-4. Such TCR may comprise TRAV13-1, TRAJ3, TRBV27, TRBD2, and TRBJ1-1. Such TCR may comprise TRAV20, TRAJ20, TRBV7-2, TRBD1, and TRBJ2-7. Such TCR may comprise TRAV8-4, TRAJ42, TRBV9, TRBD1, and TRBJ2-1. Such TCR may comprise TRAV1-2, TRAJ31, TRBV7-9, TRBD1, and TRBJ1-5. Such TCR may comprise TRAV12-1, TRAJ13, TRBV20-1, TRBD1, and TRBJ2-7. Such TCR may comprise TRAV12-1, TRAJ4, TRBV28, TRBD2, and TRBJ2-7. Such TCR may comprise TRAV21, TRAJ4, TRBV27, TRBD2, and TRBJ2-2. Such TCR may comprise TRAV3, TRAJ9, TRBV7-9, TRBD1, and TRBJ2-7. Such TCR may comprise TRAV26-1, TRAJ42, TRBV19, and TRBJ2-2. Such TCR may comprise TRAV21, TRAJ47, TRBV19, and TRBJ1-1. Such TCR may comprise TRAV26-1, TRAJ34, TRBV20-1, TRBD2, and TRBJ1-2. Such TCR may comprise TRAV21, TRAJ31, TRBV20-1, TRBD1, and TRBJ2-7. Such TCR may comprise TRAV12-1, TRAJ11, TRBV20-1, TRBD2, and TRBJ1-2. Such TCR may comprise TRAV17, TRAJ34, TRBV6-1, TRBD2, and TRBJ2-1. Such TCR may comprise TRAV13-2, TRAJ47, TRBV19, TRBD2, and TRBJ2-1. Such TCR may comprise TRAV29DV5, TRAJ28, TRBV27, TRBD2, and TRBJ2-4. Such TCR may comprise TRAV13-2, TRAJ17, TRBV27, TRBD2, and TRBJ1-5. Such TCR may comprise TRAV38-2DV8, TRAJ57, TRBV5-4, TRBD1, and TRBJ1-2. Such TCR may comprise TRAV17, TRAJ32, TRBV7-8, TRBD2, and TRBJ2-1. Such TCR may comprise TRAV21, TRAJ39, TRBV20-1, TRBD1, and TRBJ2-7. Such TCR may comprise TRAV12-3, TRAJ20, TRBV7-9, TRBD1, and TRBJ2-3. Such TCR may comprise TRAV1-1, TRAJ4, TRBV20-1, TRBD1, and TRBJ2-7. Such TCR may comprise TRAV12-1, TRAJ9, TRBV2, TRBD1, and TRBJ2-7. Such TCR may comprise TRAV19, TRAJ32, TRBV9, TRBD1, and TRBJ1-2. Such TCR may comprise TRAV8-3, TRAJ6, TRBV9, TRBD2, and TRBJ2-1. Such TCR may comprise TRAV19, TRAJ40, TRBV7-9, and TRBJ2-7. Such TCR may comprise TRAV5, TRAJ37, TRBV5-6, TRBD2, and TRBJ1-1. Such TCR may comprise TRAV21, TRAJ33, TRBV20-1, TRBD2, and TRBJ1-2. Such TCR may comprise TRAV29DV5, TRAJ3, TRBV20-1, TRBD1, and TRBJ2-7. Such TCR may comprise TRAV1-1, TRAJ4, TRBV20-1, TRBD2, and TRBJ1-2. Such TCR may comprise TRAV21, TRAJ6, TRBV10-3, and TRBJ1-1. Such TCR may comprise TRAV19, TRAJ23, TRBV9, TRBD1, and TRBJ1-1. Such TCR may comprise TRAV12-2, TRAJ20, TRBV11-2, TRBD2, and TRBJ2-2. Such TCR may comprise TRAV1-2, TRAJ15, TRBV24-1, TRBD2, and TRBJ2-1. Such TCR may comprise TRAV21, TRAJ9, TRBV5-4, and TRBJ1-6. Such TCR may comprise TRAV8-6, TRAJ12, TRBV7-9, TRBD1, and TRBJ2-2. Such TCR may comprise TRAV21, TRAJ31, TRBV11-2, TRBD2, and TRBJ1-2. Such TCR may comprise TRAV21, TRAJ41, TRBV9, TRBD1, and TRBJ1-1. Such TCR may comprise TRAV25, TRAJ28, TRBV7-2, TRBD2, and TRBJ2-6. Such TCR may comprise TRAV21, TRAJ33, TRBV10-3, TRBD1, and TRBJ1-3. Such TCR may comprise TRAV21, TRAJ49, TRBV5-1, TRBD1, and TRBJ2-5. Such TCR may comprise TRAV1-1, TRAJ34, TRBV6-6, and TRBJ1-5. Such TCR may comprise TRAV24, TRAJ6, TRBV7-2, TRBD1, and TRBJ2-1. Such TCR may comprise TRAV1-1, TRAJ15, TRBV6-6, and TRBJ1-5. Such TCR may comprise TRAV21, TRAJ15, TRBV29-1, and TRBJ1-1. Such TCR may comprise TRAV21, TRAJ43, TRBV12-4, and TRBJ1-5. Such TCR may comprise TRAV21, TRAJ30, TRBV9, TRBD1, and TRBJ1-4. Such TCR may comprise TRAV21, TRAJ31, TRBV5-1, TRBD1, and TRBJ2-7. Such TCR may comprise TRAV26-1, TRAJ45, TRBV19, TRBD2, and TRBJ2-1. Such TCR may comprise TRAV21, TRAJ43, TRBV24-1, TRBD2, and TRBJ2-1. Such TCR may comprise TRAV21, TRAJ31, TRBV24-1, TRBD2, and TRBJ2-1. Such TCR may comprise TRAV29DV5, TRAJ28, TRBV4-1, TRBD1, and TRBJ1-4. Such TCR may comprise TRAV26-2, TRAJ44, TRBV27, and TRBJ2-1. Such TCR may comprise TRAV21, TRAJ31, TRBV9, TRBD1, and TRBJ1-5. Such TCR may comprise TRAV21, TRAJ36, TRBV9, TRBD1, and TRBJ1-2. Such TCR may comprise TRAV21, TRAJ9, TRBV9, TRBD1, and TRBJ1-1. Such TCR may comprise TRAV8-3, TRAJ15, TRBV4-1, and TRBJ2-1. Such TCR may comprise TRAV21, TRAJ43, TRBV24-1, TRBD1, and TRBJ2-3. Such TCR may comprise TRAV29DV5, TRAJ40, TRBV7-9, TRBD1, and TRBJ1-6. Such TCR may comprise TRAV30, TRAJ32, TRBV28, TRBD1, and TRBJ1-1. Such TCR may comprise TRAV38-2DV8, TRAJ26, TRBV7-9, TRBD2, and TRBJ2-5. Such TCR may comprise TRAV12-1, TRAJ6, TRBV20-1, TRBD1, and TRBJ1-3. Such TCR may comprise TRAV21, TRAJ47, TRBV5-1, and TRBJ1-1. Such TCR may comprise TRAV38-2DV8, TRAJ45, TRBV29-1, TRBD1, and TRBJ2-7. Such TCR may comprise TRAV21, TRAJ15, TRBV7-2, and TRBJ1-1. Such TCR may comprise TRAV12-2, TRAJ29, TRBV9, TRBD1, and TRBJ1-1. Such TCR may comprise TRAV3, TRAJ6, TRBV28, TRBD1, and TRBJ2-7. Such TCR may comprise TRAV21, TRAJ9, TRBV10-3, TRBD1, and TRBJ1-3. Such TCR may comprise TRAV1-2, TRAJ15, TRBV7-9, TRBD1, and TRBJ2-2. Such TCR may comprise TRAV8-6, TRAJ40, TRBV15, and TRBJ2-5. Such TCR may comprise TRAV38-2DV8, TRAJ57, TRBV13, TRBD1, and TRBJ1-4. Such TCR may comprise TRAV8-6, TRAJ10, TRBV7-9, and TRBJ1-1. Such TCR may comprise TRAV21, TRAJ20, TRBV5-4, TRBD1, and TRBJ1-5. Such TCR may comprise TRAV13-1, TRAJ28, TRBV7-8, TRBD1, and TRBJ1-5. Such TCR may comprise TRAV21, TRAJ9, TRBV24-1, TRBD2, and TRBJ2-1. Such TCR may comprise TRAV1-2, TRAJ15, TRBV2, TRBD2, and TRBJ2-1. Such TCR may comprise TRAV35, TRAJ26, TRBV27, TRBD1, and TRBJ1-1. Such TCR may comprise TRAV38-2DV8, TRAJ43, TRBV5-1, TRBD2, and TRBJ2-5. Such TCR may comprise TRAV5, TRAJ32, TRBV19, TRBD2, and TRBJ2-7. Such TCR may comprise TRAV13-1, TRAJ21, TRBV5-1, TRBD2, and TRBJ2-7. Such TCR may comprise TRAV12-2, TRAJ45, TRBV12-4, TRBD1, and TRBJ2-1. Such TCR may comprise TRAV21, TRAJ31, TRBV12-5, and TRBJ2-2. Such TCR may comprise TRAV24, TRAJ52, TRBV27, and TRBJ2-1. Such TCR may comprise TRAV21, TRAJ52, TRBV19, TRBD1, and TRBJ1-1. Such TCR may comprise TRAV36DV7, TRAJ44, TRBV7-9, TRBD1, and TRBJ2-2. Such TCR may comprise TRAV3, TRAJ29, TRBV11-2, TRBD1, and TRBJ2-5. Such TCR may comprise TRAV1-1, TRAJ15, TRBV13, TRBD1, and TRBJ1-2. Such TCR may comprise TRAV29DV5, TRAJ52, TRBV11-3, TRBD1, and TRBJ2-3. Such TCR may comprise TRAV12-1, TRAJ6, TRBV19, TRBD1, and TRBJ1-1. Such TCR may comprise TRAV19, TRAJ13, TRBV27, TRBD2, and TRBJ2-7. Such TCR may comprise TRAV17, TRAJ43, TRBV12-3, and TRBJ1-4. Such TCR may comprise TRAV12-3, TRAJ20, TRBV12-4, and TRBJ2-1. Such TCR may comprise TRAV21, TRAJ52, TRBV4-1, TRBD2, and TRBJ2-7. Such TCR may comprise TRAV21, TRAJ23, TRBV19, TRBD1, and TRBJ2-7. Such TCR may comprise TRAV1-1, TRAJ30, TRBV13, TRBD1, and TRBJ1-2. Such TCR may comprise TRAV12-2, TRAJ43, TRBV12-4, TRBD2, and TRBJ2-7. Such TCR may comprise TRAV24, TRAJ10, TRBV5-1, TRBD1, and TRBJ1-2. Such TCR may comprise TRAV5, TRAJ9, TRBV4-1, TRBD2, and TRBJ1-1. Such TCR may comprise TRAV21, TRAJ40, TRBV7-8, and TRBJ1-1. Such TCR may comprise TRAV13-1, TRAJ45, TRBV9, TRBD1, and TRBJ1-6. Such TCR may comprise TRAV12-1, TRAJ26, TRBV4-1, TRBD1, and TRBJ2-7. Such TCR may comprise TRAV26-2, TRAJ45, TRBV19, and TRBJ1-2. Such TCR may comprise TRAV22, TRAJ23, TRBV5-4, TRBD1, and TRBJ1-1. Such TCR may comprise TRAV19, TRAJ42, TRBV28, and TRBJ2-7. Such TCR may comprise TRAV17, TRAJ52, TRBV7-8, TRBD1, and TRBJ1-2. Such TCR may comprise TRAV12-1, TRAJ39, TRBV3-1, TRBD1, and TRBJ2-3. Such TCR may comprise TRAV21, TRAJ9, TRBV5-1, TRBD1, and TRBJ2-7. Such TCR may comprise TRAV1-1, TRAJ5, TRBV24-1, TRBD2, and TRBJ2-1. Such TCR may comprise TRAV23DV6, TRAJ13, TRBV6-5, TRBD1, and TRBJ2-1. Such TCR may comprise TRAV8-6, TRAJ12, TRBV24-1, TRBD2, and TRBJ2-1. Such TCR may comprise TRAV1-2, TRAJ28, TRBV27, and TRBJ2-3. Such TCR may comprise TRAV29DV5, TRAJ34, TRBV4-1, TRBD2, and TRBJ2-3. Such TCR may comprise TRAV12-1, TRAJ21, TRBV28, TRBD1, and TRBJ1-5. Such TCR may comprise TRAV9-2, TRAJ29, TRBV5-8, TRBD2, and TRBJ1-1. Such TCR may comprise TRAV27, TRAJ40, TRBV7-6, and TRBJ2-7. Such TCR may comprise TRAV21, TRAJ31, TRBV7-8, TRBD1, and TRBJ1-2. Such TCR may comprise TRAV21, TRAJ30, TRBV9, TRBD1, and TRBJ1-1. Such TCR may comprise TRAV19, TRAJ30, TRBV20-1, and TRBJ2-1. Such TCR may comprise TRAV1-1, TRAJ26, TRBV12-5, TRBD2, and TRBJ2-1. Such TCR may comprise TRAV1-2, TRAJ33, TRBV9, TRBD2, and TRBJ2-3. Such TCR may comprise TRAV26-1, TRAJ50, TRBV27, TRBD1, and TRBJ2-3. Such TCR may comprise TRAV40, TRAJ41, TRBV6-5, TRBD2, and TRBJ1-2. Such TCR may comprise TRAV12-2, TRAJ31, TRBV7-9, TRBD1, and TRBJ1-5. Such TCR may comprise TRAV5, TRAJ43, TRBV5-1, TRBD1, and TRBJ2-3. Such TCR may comprise TRAV24, TRAJ52, TRBV5-1, and TRBJ1-1. Such TCR may comprise TRAV1-2, TRAJ11, TRBV7-6, TRBD1, and TRBJ1-3. Such TCR may comprise TRAV21, TRAJ33, TRBV5-1, TRBD1, and TRBJ2-7. Such TCR may comprise TRAV21, TRAJ39, TRBV10-3, and TRBJ2-1. Such TCR may comprise TRAV21, TRAJ20, TRBV14, TRBD1, and TRBJ1-2. Such TCR may comprise TRAV29DV5, TRAJ48, TRBV7-9, TRBD1, and TRBJ1-2. Such TCR may comprise TRAV13-1, TRAJ22, TRBV29-1, and TRBJ1-1. Such TCR may comprise TRAV21, TRAJ33, TRBV10-3, and TRBJ2-1. Such TCR may comprise TRAV39, TRAJ49, TRBV24-1, TRBD1, and TRBJ1-4. Such TCR may comprise TRAV13-1, TRAJ23, TRBV27, TRBD1, and TRBJ1-2. Such TCR may comprise TRAV21, TRAJ9, TRBV9, TRBD1, and TRBJ2-7. Such TCR may comprise TRAV21, TRAJ33, TRBV9, and TRBJ1-1. Such TCR may comprise TRAV19, TRAJ28, TRBV19, TRBD1, and TRBJ1-4. Such TCR may comprise TRAV10, TRAJ8, TRBV5-1, TRBD1, and TRBJ2-7. Such TCR may comprise TRAV21, TRAJ48, TRBV27, TRBD2, and TRBJ2-2. Such TCR may comprise TRAV12-2, TRAJ4, TRBV7-2, TRBD2, and TRBJ2-1. Such TCR may comprise TRAV21, TRAJ31, TRBV5-1, and TRBJ1-1. Such TCR may comprise TRAV21, TRAJ33, TRBV9, and TRBJ1-1. Such TCR may comprise TRAV21, TRAJ6, TRBV6-6, TRBD1, and TRBJ1-5. Such TCR may comprise TRAV21, TRAJ29, TRBV5-1, TRBD2, and TRBJ2-5. Such TCR may comprise TRAV41, TRAJ41, TRBV7-9, TRBD1, and TRBJ1-2. Such TCR may comprise TRAV21, TRAJ33, TRBV5-1, and TRBJ1-1. Such TCR may comprise TRAV17, TRAJ39, TRBV27, TRBD2, and TRBJ2-1. Such TCR may comprise TRAV13-2, TRAJ13, TRBV9, and TRBJ1-3. Such TCR may comprise TRAV21, TRAJ33, TRBV5-1, TRBD2, and TRBJ2-5. Such TCR may comprise TRAV17, TRAJ57, TRBV9, TRBD2, and TRBJ1-1. Such TCR may comprise TRAV5, TRAJ44, TRBV7-9, TRBD1, and TRBJ1-1. Such TCR may comprise TRAV3, TRAJ39, TRBV27, TRBD1, and TRBJ1-5. Such TCR may comprise TRAV1-2, TRAJ4, TRBV11-1, TRBD2, and TRBJ2-1. Such TCR may comprise TRAV38-2DV8, TRAJ40, TRBV7-8, TRBD1, and TRBJ2-7. Such TCR may comprise TRAV8-3, TRAJ41, TRBV7-9, and TRBJ1-1. Such TCR may comprise TRAV5, TRAJ4, TRBV11-2, and TRBJ2-1. Such TCR may comprise TRAV24, TRAJ49, TRBV6-5, TRBD1, and TRBJ1-1. Such TCR may comprise TRAV4, TRAJ45, TRBV24-1, TRBD2, and TRBJ1-1. Such TCR may comprise TRAV29DV5, TRAJ48, TRBV20-1, TRBD2, and TRBJ2-7. Such TCR may comprise TRAV26-2, TRAJ44, TRBV6-1, and TRBJ2-7. Such TCR may comprise TRAV21, TRAJ27, TRBV7-9, and TRBJ1-6. Such TCR may comprise TRAV26-1, TRAJ49, TRBV7-9, and TRBJ2-7. Such TCR may comprise TRAV12-1, TRAJ5, TRBV7-8, TRBD1, and TRBJ2-1. Such TCR may comprise TRAV21, TRAJ33, TRBV9, TRBD1, and TRBJ2-7. Such TCR may comprise TRAV21, TRAJ20, TRBV27, TRBD1, and TRBJ2-4. Such TCR may comprise TRAV39, TRAJ42, TRBV9, TRBD1, and TRBJ2-7. Such TCR may comprise TRAV1-2, TRAJ39, TRBV27, TRBD2, and TRBJ1-4. Such TCR may comprise TRAV1-1, TRAJ34, TRBV9, TRBD1, and TRBJ2-3. Such TCR may comprise TRAV25, TRAJ34, TRBV29-1, TRBD1, and TRBJ1-2. Such TCR may comprise TRAV39, TRAJ39, TRBV30, TRBD1, and TRBJ2-1. Such TCR may comprise TRAV21, TRAJ6, TRBV20-1, TRBD2, and TRBJ1-1. Such TCR may comprise TRAV8-6, TRAJ30, TRBV9, TRBD2, and TRBJ2-2. Such TCR may comprise TRAV21, TRAJ18, TRBV27, TRBD1, and TRBJ1-2. Such TCR may comprise TRAV12-3, TRAJ23, TRBV11-3, TRBD1, and TRBJ2-2. Such TCR may comprise TRAV12-1, TRAJ47, TRBV5-6, and TRBJ1-2. Such TCR may comprise TRAV22, TRAJ31, TRBV5-6, and TRBJ2-7. Such TCR may comprise TRAV21, TRAJ33, TRBV14, TRBD1, and TRBJ1-2. Such TCR may comprise TRAV1-2, TRAJ31, TRBV2, TRBD2, and TRBJ2-7. Such TCR may comprise TRAV1-2, TRAJ5, TRBV20-1, TRBD2, and TRBJ2-7. Such TCR may comprise TRAV21, TRAJ33, TRBV5-1, TRBD1, and TRBJ1-2. Such TCR may comprise TRAV16, TRAJ28, TRBV7-9, TRBD1, and TRBJ2-1. Such TCR may comprise TRAV13-1, TRAJ12, TRBV20-1, TRBD2, and TRBJ1-1. Such TCR may comprise TRAV17, TRAJ52, TRBV29-1, TRBD2, and TRBJ2-1. Such TCR may comprise TRAV36DV7, TRAJ49, TRBV15, TRBD2, and TRBJ2-3. Such TCR may comprise TRAV12-3, TRAJ58, TRBV12-4, TRBD2, and TRBJ2-1. Such TCR may comprise TRAV16, TRAJ18, TRBV27, TRBD1, and TRBJ2-7. Such TCR may comprise TRAV21, TRAJ33, TRBV27, TRBD2, and TRBJ2-2. Such TCR may comprise TRAV12-2, TRAJ48, TRBV27, and TRBJ2-6. Such TCR may comprise TRAV21, TRAJ33, TRBV2, TRBD1, and TRBJ1-2. Such TCR may comprise TRAV29DV5, TRAJ37, TRBV5-4, TRBD2, and TRBJ2-7. Such TCR may comprise TRAV21, TRAJ20, TRBV24-1, TRBD1, and TRBJ1-4. Such TCR may comprise TRAV12-2, TRAJ6, TRBV15, TRBD1, and TRBJ2-2. Such TCR may comprise TRAV12-1, TRAJ42, TRBV27, TRBD1, and TRBJ1-5. Such TCR may comprise TRAV1-1, TRAJ23, TRBV25-1, TRBD1, and TRBJ2-7. Such TCR may comprise TRAV38-1, TRAJ28, TRBV5-1, TRBD1, and TRBJ2-1. Such TCR may comprise TRAV21, TRAJ33, TRBV2, TRBD1, and TRBJ1-1. Such TCR may comprise TRAV21, TRAJ31, TRBV5-1, TRBD1, and TRBJ2-7. Such TCR may comprise TRAV8-6, TRAJ42, TRBV27, and TRBJ1-1. Such TCR may comprise TRAV40, TRAJ32, TRBV7-6, and TRBJ2-2. Such TCR may comprise TRAV5, TRAJ5, TRBV20-1, TRBD1, and TRBJ2-5. Such TCR may comprise TRAV12-1, TRAJ40, TRBV4-1, and TRBJ2-5. Such TCR may comprise TRAV13-2, TRAJ53, TRBV5-1, and TRBJ1-1. Such TCR may comprise TRAV12-2, TRAJ48, TRBV5-6, TRBD1, and TRBJ2-2. Such TCR may comprise TRAV12-3, TRAJ15, TRBV20-1, and TRBJ2-7. Such TCR may comprise TRAV12-3, TRAJ23, TRBV13, TRBD1, and TRBJ2-3. Such TCR may comprise TRAV13-2, TRAJ9, TRBV7-3, and TRBJ1-6. Such TCR may comprise TRAV21, TRAJ45, TRBV5-1, and TRBJ1-1. Such TCR may comprise TRAV25, TRAJ31, TRBV29-1, TRBD1, and TRBJ1-2. Such TCR may comprise TRAV34, TRAJ37, TRBV28, and TRBJ1-1. Such TCR may comprise TRAV1-2, TRAJ9, TRBV9, TRBD1, and TRBJ2-6. Such TCR may comprise TRAV21, TRAJ36, TRBV9, TRBD1, and TRBJ2-7. Such TCR may comprise TRAV12-1, TRAJ34, TRBV6-1, and TRBJ2-7. Such TCR may comprise TRAV12-1, TRAJ26, TRBV11-3, TRBD1, and TRBJ1-1. Such TCR may comprise TRAV17, TRAJ36, TRBV5-4, and TRBJ2-1. Such TCR may comprise TRAV21, TRAJ49, TRBV4-1, TRBD1, and TRBJ1-1. Such TCR may comprise TRAV12-1, TRAJ13, TRBV9, TRBD2, and TRBJ2-7. Such TCR may comprise TRAV24, TRAJ7, TRBV7-9, TRBD1, and TRBJ2-1. Such TCR may comprise TRAV21, TRAJ20, TRBV9, TRBD2, and TRBJ1-1. Such TCR may comprise TRAV13-2, TRAJ49, TRBV6-1, TRBD1, and TRBJ2-5. Such TCR may comprise TRAV21, TRAJ33, TRBV5-5, TRBD1, and TRBJ1-2. Such TCR may comprise TRAV12-1, TRAJ39, TRBV4-2, TRBD2, and TRBJ2-7. Such TCR may comprise TRAV26-2, TRAJ30, TRBV9, TRBD1, and TRBJ2-7. Such TCR may comprise TRAV20, TRAJ45, TRBV5-4, TRBD1, and TRBJ2-7. Such TCR may comprise TRAV21, TRAJ31, TRBV7-8, TRBD2, and TRBJ1-2. Such TCR may comprise TRAV38-2DV8, TRAJ48, TRBV2, TRBD1, and TRBJ1-5. Such TCR may comprise TRAV25, TRAJ15, TRBV9, TRBD1, and TRBJ2-1. Such TCR may comprise TRAV21, TRAJ49, TRBV5-4, and TRBJ2-7. Such TCR may comprise TRAV21, TRAJ12, TRBV27, TRBD1, and TRBJ2-2. Such TCR may comprise TRAV38-2DV8, TRAJ54, TRBV24-1, and TRBJ2-2. Such TCR may comprise TRAV17, TRAJ52, TRBV27, and TRBJ2-1. Such TCR may comprise TRAV21, TRAJ28, TRBV9, TRBD2, and TRBJ2-7. Such TCR may comprise TRAV21, TRAJ36, TRBV4-1, TRBD1, and TRBJ1-1. Such TCR may comprise TRAV21, TRAJ31, TRBV5-4, and TRBJ1-2. Such TCR may comprise TRAV21, TRAJ33, TRBV5-1, TRBD1, and TRBJ2-3. Such TCR may comprise TRAV12-1, TRAJ43, TRBV6-5, TRBD1, and TRBJ2-7. Such TCR may comprise TRAV21, TRAJ41, TRBV9, and TRBJ2-2. Such TCR may comprise TRAV19, TRAJ40, TRBV20-1, and TRBJ2-7. Such TCR may comprise TRAV12-2, TRAJ52, TRBV6-1, TRBD2, and TRBJ2-7. Such TCR may comprise TRAV26-1, TRAJ57, TRBV2, and TRBJ2-7. Such TCR may comprise TRAV21, TRAJ36, TRBV12-4, TRBD1, and TRBJ1-6. Such TCR may comprise TRAV8-4, TRAJ34, TRBV7-9, and TRBJ2-7. Such TCR may comprise TRAV19, TRAJ32, TRBV7-9, and TRBJ1-2. Such TCR may comprise TRAV21, TRAJ6, TRBV3-1, TRBD2, and TRBJ1-4. Such TCR may comprise TRAV13-2, TRAJ29, TRBV5-1, and TRBJ2-2. Such TCR may comprise TRAV14DV4, TRAJ26, TRBV7-9, TRBD1, and TRBJ2-5. Such TCR may comprise TRAV35, TRAJ44, TRBV27, TRBD1, and TRBJ2-1. Such TCR may comprise TRAV21, TRAJ24, TRBV27, TRBD1, and TRBJ1-6. Such TCR may comprise TRAV25, TRAJ21, TRBV28, TRBD1, and TRBJ2-7. Such TCR may comprise TRAV3, TRAJ36, TRBV28, and TRBJ1-5. Such TCR may comprise TRAV26-2, TRAJ52, TRBV5-6, TRBD2, and TRBJ2-1. Such TCR may comprise TRAV8-6, TRAJ40, TRBV9, TRBD1, and TRBJ2-7. Such TCR may comprise TRAV21, TRAJ42, TRBV28, TRBD1, and TRBJ2-7. Such TCR may comprise TRAV12-1, TRAJ32, TRBV20-1, TRBD1, and TRBJ1-1. Such TCR may comprise TRAV24, TRAJ24, TRBV28, TRBD2, and TRBJ2-5. Such TCR may comprise TRAV21, TRAJ36, TRBV9, TRBD2, and TRBJ1-1. Such TCR may comprise TRAV12-1, TRAJ26, TRBV2, and TRBJ1-6. Such TCR may comprise TRAV21, TRAJ31, TRBV29-1, TRBD1, and TRBJ1-1. Such TCR may comprise TRAV39, TRAJ33, TRBV6-1, and TRBJ1-5. Such TCR may comprise TRAV3, TRAJ38, TRBV27, TRBD2, and TRBJ2-7. Such TCR may comprise TRAV10, TRAJ33, TRBV30, TRBD2, and TRBJ2-1. Such TCR may comprise TRAV21, TRAJ20, TRBV2, TRBD1, and TRBJ2-1. Such TCR may comprise TRAV13-1, TRAJ20, TRBV5-1, TRBD1, and TRBJ1-1. Such TCR may comprise TRAV27, TRAJ45, TRBV27, TRBD1, and TRBJ1-6. Such TCR may comprise TRAV21, TRAJ18, TRBV9, TRBD1, and TRBJ2-1. Such TCR may comprise TRAV26-2, TRAJ28, TRBV27, and TRBJ1-5. Such TCR may comprise TRAV12-1, TRAJ34, TRBV9, TRBD2, and TRBJ2-7. Such TCR may comprise TRAV13-2, TRAJ40, TRBV4-1, and TRBJ1-3. Such TCR may comprise TRAV12-1, TRAJ34, TRBV4-2, TRBD2, and TRBJ2-7. Such TCR may comprise TRAV13-2, TRAJ46, TRBV7-9, TRBD1, and TRBJ2-1. Such TCR may comprise TRAV21, TRAJ36, TRBV9, TRBD2, and TRBJ2-7. Such TCR may comprise TRAV1-2, TRAJ20, TRBV11-3, TRBD1, and TRBJ2-3. Such TCR may comprise TRAV3, TRAJ6, TRBV12-4, TRBD1, and TRBJ2-2. Such TCR may comprise TRAV25, TRAJ32, TRBV19, TRBD1, and TRBJ1-1. Such TCR may comprise TRAV21, TRAJ33, TRBV9, TRBD1, and TRBJ1-1. Such TCR may comprise TRAV19, TRAJ53, TRBV7-7, TRBD1, and TRBJ2-1. Such TCR may comprise TRAV12-1, TRAJ20, TRBV10-3, TRBD2, and TRBJ2-3. Such TCR may comprise TRAV12-1, TRAJ34, TRBV6-5, TRBD1, and TRBJ2-7. Such TCR may comprise TRAV26-2, TRAJ43, TRBV25-1, TRBD1, and TRBJ1-2. Such TCR may comprise TRAV8-6, TRAJ20, TRBV7-9, TRBD1, and TRBJ2-2. Such TCR may comprise TRAV3, TRAJ18, TRBV20-1, TRBD2, and TRBJ2-1. Such TCR may comprise TRAV21, TRAJ40, TRBV11-3, TRBD1, and TRBJ1-2. Such TCR may comprise TRAV2, TRAJ10, TRBV6-5, TRBD2, and TRBJ2-7.

[0332] The TCR specific for A*01:01_EVDPIGHLY (SEQ ID NO: 3051) may comprise an alpha VJ sequence. The alpha VJ sequence may be any one of SEQ ID NOS 3656-3961 or 4302-4305.

[0333] The TCR specific for A*01:01_EVDPIGHLY (SEQ ID NO: 3051) may comprise a beta V(D)J sequence. The beta V(D)J sequence may be any one of SEQ ID NOS 3962-4269 or 4317-4320.

[0334] In some embodiments, the alpha VJ sequence is SEQ ID NO: 3656 and the beta V(D)J sequence is SEQ ID NO: 3962. In some embodiments, the alpha VJ sequence is SEQ ID NO: 3657 and the beta V(D)J sequence is SEQ ID NO: 3963. In some embodiments, the alpha VJ sequence is SEQ ID NO: 3658 and the beta V(D)J sequence is SEQ ID NO: 3964. In some embodiments, the alpha VJ sequence is SEQ ID NO: 3659 and the beta V(D)J sequence is SEQ ID NO: 3963. In some embodiments, the alpha VJ sequence is SEQ ID NO: 3660 and the beta V(D)J sequence is SEQ ID NO: 3965. In some embodiments, the alpha VJ sequence is SEQ ID NO: 3661 and the beta V(D)J sequence is SEQ ID NO: 3966. In some embodiments, the alpha VJ sequence is SEQ ID NO: 3662 and the beta V(D)J sequence is SEQ ID NO: 3967. In some embodiments, the alpha VJ sequence is SEQ ID NO: 3663 and the beta V(D)J sequence is SEQ ID NO: 3968. In some embodiments, the alpha VJ sequence is SEQ ID NO: 3664 and the beta V(D)J sequence is SEQ ID NO: 3969. In some embodiments, the alpha VJ sequence is SEQ ID NO: 3665 and the beta V(D)J sequence is SEQ ID NO: 3970. In some embodiments, the alpha VJ sequence is SEQ ID NO: 3666 and the beta V(D)J sequence is SEQ ID NO: 3971. In some embodiments, the alpha VJ sequence is SEQ ID NO: 3667 and the beta V(D)J sequence is SEQ ID NO: 3972. In some embodiments, the alpha VJ sequence is SEQ ID NO: 3668 and the beta V(D)J sequence is SEQ ID NO: 3973. In some embodiments, the alpha VJ sequence is SEQ ID NO: 3657 and the beta V(D)J sequence is SEQ ID NO: 3962. In some embodiments, the alpha VJ sequence is SEQ ID NO: 3662 and the beta V(D)J sequence is SEQ ID NO: 3963. In some embodiments, the alpha VJ sequence is SEQ ID NO: 3669 and the beta V(D)J sequence is SEQ ID NO: 3974. In some embodiments, the alpha VJ sequence is SEQ ID NO: 3670 and the beta V(D)J sequence is SEQ ID NO: 3975. In some embodiments, the alpha VJ sequence is SEQ ID NO: 3658 and the beta V(D)J sequence is SEQ ID NO: 3963. In some embodiments, the alpha VJ sequence is SEQ ID NO: 3671 and the beta V(D)J sequence is SEQ ID NO: 3976. In some embodiments, the alpha VJ sequence is SEQ ID NO: 3672 and the beta V(D)J sequence is SEQ ID NO: 3977. In some embodiments, the alpha VJ sequence is SEQ ID NO: 3673 and the beta V(D)J sequence is SEQ ID NO: 3978. In some embodiments, the alpha VJ sequence is SEQ ID NO: 3674 and the beta V(D)J sequence is SEQ ID NO: 3979. In some embodiments, the alpha VJ sequence is SEQ ID NO: 3659 and the beta V(D)J sequence is SEQ ID NO: 3967. In some embodiments, the alpha VJ sequence is SEQ ID NO: 3675 and the beta V(D)J sequence is SEQ ID NO: 3980. In some embodiments, the alpha VJ sequence is SEQ ID NO: 3659 and the beta V(D)J sequence is SEQ ID NO: 3966. In some embodiments, the alpha VJ sequence is SEQ ID NO: 3676 and the beta V(D)J sequence is SEQ ID NO: 3981. In some embodiments, the alpha VJ sequence is SEQ ID NO: 3659 and the beta V(D)J sequence is SEQ ID NO: 3964. In some embodiments, the alpha VJ sequence is SEQ ID NO: 3677 and the beta V(D)J sequence is SEQ ID NO: 3982. In some embodiments, the alpha VJ sequence is SEQ ID NO: 3678 and the beta V(D)J sequence is SEQ ID NO: 3983. In some embodiments, the alpha VJ sequence is SEQ ID NO: 3662 and the beta V(D)J sequence is SEQ ID NO: 3962. In some embodiments, the alpha VJ sequence is SEQ ID NO: 3679 and the beta V(D)J sequence is SEQ ID NO: 3984. In some embodiments, the alpha VJ sequence is SEQ ID NO: 3680 and the beta V(D)J sequence is SEQ ID NO: 3985. In some embodiments, the alpha VJ sequence is SEQ ID NO: 3681 and the beta V(D)J sequence is SEQ ID NO: 3986. In some embodiments, the alpha VJ sequence is SEQ ID NO: 3682 and the beta V(D)J sequence is SEQ ID NO: 3987. In some embodiments, the alpha VJ sequence is SEQ ID NO: 3683 and the beta V(D)J sequence is SEQ ID NO: 3988. In some embodiments, the alpha VJ sequence is SEQ ID NO: 3684 and the beta V(D)J sequence is SEQ ID NO: 3989. In some embodiments, the alpha VJ sequence is SEQ ID NO: 3685 and the beta V(D)J sequence is SEQ ID NO: 3990. In some embodiments, the alpha VJ sequence is SEQ ID NO: 3686 and the beta V(D)J sequence is SEQ ID NO: 3991. In some embodiments, the alpha VJ sequence is SEQ ID NO: 3687 and the beta V(D)J sequence is SEQ ID NO: 3992. In some embodiments, the alpha VJ sequence is SEQ ID NO: 3688 and the beta V(D)J sequence is SEQ ID NO: 3993. In some embodiments, the alpha VJ sequence is SEQ ID NO: 3689 and the beta V(D)J sequence is SEQ ID NO: 3994. In some embodiments, the alpha VJ sequence is SEQ ID NO: 3690 and the beta V(D)J sequence is SEQ ID NO: 3995. In some embodiments, the alpha VJ sequence is SEQ ID NO: 3691 and the beta V(D)J sequence is SEQ ID NO: 3996. In some embodiments, the alpha VJ sequence is SEQ ID NO: 3692 and the beta V(D)J sequence is SEQ ID NO: 3997. In some embodiments, the alpha VJ sequence is SEQ ID NO: 3693 and the beta V(D)J sequence is SEQ ID NO: 3998. In some embodiments, the alpha VJ sequence is SEQ ID NO: 3694 and the beta V(D)J sequence is SEQ ID NO: 3999. In some embodiments, the alpha VJ sequence is SEQ ID NO: 3695 and the beta V(D)J sequence is SEQ ID NO: 4000. In some embodiments, the alpha VJ sequence is SEQ ID NO: 3661 and the beta V(D)J sequence is SEQ ID NO: 3962. In some embodiments, the alpha VJ sequence is SEQ ID NO: 3696 and the beta V(D)J sequence is SEQ ID NO: 4001. In some embodiments, the alpha VJ sequence is SEQ ID NO: 3697 and the beta V(D)J sequence is SEQ ID NO: 4002. In some embodiments, the alpha VJ sequence is SEQ ID NO: 3698 and the beta V(D)J sequence is SEQ ID NO: 4003. In some embodiments, the alpha VJ sequence is SEQ ID NO: 3699 and the beta V(D)J sequence is SEQ ID NO: 4004. In some embodiments, the alpha VJ sequence is SEQ ID NO: 3700 and the beta V(D)J sequence is SEQ ID NO: 3967. In some embodiments, the alpha VJ sequence is SEQ ID NO: 3701 and the beta V(D)J sequence is SEQ ID NO: 4005. In some embodiments, the alpha VJ sequence is SEQ ID NO: 3658 and the beta V(D)J sequence is SEQ ID NO: 3974. In some embodiments, the alpha VJ sequence is SEQ ID NO: 3702 and the beta V(D)J sequence is SEQ ID NO: 4006. In some embodiments, the alpha VJ sequence is SEQ ID NO: 3658 and the beta V(D)J sequence is SEQ ID NO: 3962. In some embodiments, the alpha VJ sequence is SEQ ID NO: 3703 and the beta V(D)J sequence is SEQ ID NO: 4007. In some embodiments, the alpha VJ sequence is SEQ ID NO: 3657 and the beta V(D)J sequence is SEQ ID NO: 3966. In some embodiments, the alpha VJ sequence is SEQ ID NO: 3704 and the beta V(D)J sequence is SEQ ID NO: 4008. In some embodiments, the alpha VJ sequence is SEQ ID NO: 3705 and the beta V(D)J sequence is SEQ ID NO: 4009. In some embodiments, the alpha VJ sequence is SEQ ID NO: 3706 and the beta V(D)J sequence is SEQ ID NO: 3963. In some embodiments, the alpha VJ sequence is SEQ ID NO: 3707 and the beta V(D)J sequence is SEQ ID NO: 4010. In some embodiments, the alpha VJ sequence is SEQ ID NO: 3657 and the beta V(D)J sequence is SEQ ID NO: 3964. In some embodiments, the alpha VJ sequence is SEQ ID NO: 3708 and the beta V(D)J sequence is SEQ ID NO: 4011. In some embodiments, the alpha VJ sequence is SEQ ID NO: 3709 and the beta V(D)J sequence is SEQ ID NO: 4012. In some embodiments, the alpha VJ sequence is SEQ ID NO: 3663 and the beta V(D)J sequence is SEQ ID NO: 3963. In some embodiments, the alpha VJ sequence is SEQ ID NO: 3710 and the beta V(D)J sequence is SEQ ID NO: 4013. In some embodiments, the alpha VJ sequence is SEQ ID NO: 3711 and the beta V(D)J sequence is SEQ ID NO: 4014. In some embodiments, the alpha VJ sequence is SEQ ID NO: 3712 and the beta V(D)J sequence is SEQ ID NO: 4015. In some embodiments, the alpha VJ sequence is SEQ ID NO: 3713 and the beta V(D)J sequence is SEQ ID NO: 4016. In some embodiments, the alpha VJ sequence is SEQ ID NO: 3714 and the beta V(D)J sequence is SEQ ID NO: 4017. In some embodiments, the alpha VJ sequence is SEQ ID NO: 3715 and the beta V(D)J sequence is SEQ ID NO: 4018. In some embodiments, the alpha VJ sequence is SEQ ID NO: 3716 and the beta V(D)J sequence is SEQ ID NO: 4019. In some embodiments, the alpha VJ sequence is SEQ ID NO: 3717 and the beta V(D)J sequence is SEQ ID NO: 4020. In some embodiments, the alpha VJ sequence is SEQ ID NO: 3718 and the beta V(D)J sequence is SEQ ID NO: 4021. In some embodiments, the alpha VJ sequence is SEQ ID NO: 3719 and the beta V(D)J sequence is SEQ ID NO: 4022. In some embodiments, the alpha VJ sequence is SEQ ID NO: 3720 and the beta V(D)J sequence is SEQ ID NO: 4023. In some embodiments, the alpha VJ sequence is SEQ ID NO: 3663 and the beta V(D)J sequence is SEQ ID NO: 3962. In some embodiments, the alpha VJ sequence is SEQ ID NO: 3659 and the beta V(D)J sequence is SEQ ID NO: 3965. In some embodiments, the alpha VJ sequence is SEQ ID NO: 3677 and the beta V(D)J sequence is SEQ ID NO: 4024. In some embodiments, the alpha VJ sequence is SEQ ID NO: 3721 and the beta V(D)J sequence is SEQ ID NO: 4025. In some embodiments, the alpha VJ sequence is SEQ ID NO: 3722 and the beta V(D)J sequence is SEQ ID NO: 4026. In some embodiments, the alpha VJ sequence is SEQ ID NO: 3663 and the beta V(D)J sequence is SEQ ID NO: 3966. In some embodiments, the alpha VJ sequence is SEQ ID NO: 3659 and the beta V(D)J sequence is SEQ ID NO: 4027. In some embodiments, the alpha VJ sequence is SEQ ID NO: 3722 and the beta V(D)J sequence is SEQ ID NO: 3964. In some embodiments, the alpha VJ sequence is SEQ ID NO: 3723 and the beta V(D)J sequence is SEQ ID NO: 4028. In some embodiments, the alpha VJ sequence is SEQ ID NO: 3724 and the beta V(D)J sequence is SEQ ID NO: 4029. In some embodiments, the alpha VJ sequence is SEQ ID NO: 3725 and the beta V(D)J sequence is SEQ ID NO: 4030. In some embodiments, the alpha VJ sequence is SEQ ID NO: 3726 and the beta V(D)J sequence is SEQ ID NO: 4031. In some embodiments, the alpha VJ sequence is SEQ ID NO: 3727 and the beta V(D)J sequence is SEQ ID NO: 4032. In some embodiments, the alpha VJ sequence is SEQ ID NO: 3728 and the beta V(D)J sequence is SEQ ID NO: 4033. In some embodiments, the alpha VJ sequence is SEQ ID NO: 3729 and the beta V(D)J sequence is SEQ ID NO: 4034. In some embodiments, the alpha VJ sequence is SEQ ID NO: 3658 and the beta V(D)J sequence is SEQ ID NO: 3978. In some embodiments, the alpha VJ sequence is SEQ ID NO: 3730 and the beta V(D)J sequence is SEQ ID NO: 4035. In some embodiments, the alpha VJ sequence is SEQ ID NO: 3731 and the beta V(D)J sequence is SEQ ID NO: 4036. In some embodiments, the alpha VJ sequence is SEQ ID NO: 3732 and the beta V(D)J sequence is SEQ ID NO: 4037. In some embodiments, the alpha VJ sequence is SEQ ID NO: 3719 and the beta V(D)J sequence is SEQ ID NO: 3962. In some embodiments, the alpha VJ sequence is SEQ ID NO: 3665 and the beta V(D)J sequence is SEQ ID NO: 3963. In some embodiments, the alpha VJ sequence is SEQ ID NO: 3664 and the beta V(D)J sequence is SEQ ID NO: 3962. In some embodiments, the alpha VJ sequence is SEQ ID NO: 3676 and the beta V(D)J sequence is SEQ ID NO: 3966. In some embodiments, the alpha VJ sequence is SEQ ID NO: 3733 and the beta V(D)J sequence is SEQ ID NO: 4038. In some embodiments, the alpha VJ sequence is SEQ ID NO: 3734 and the beta V(D)J sequence is SEQ ID NO: 4039. In some embodiments, the alpha VJ sequence is SEQ ID NO: 3735 and the beta V(D)J sequence is SEQ ID NO: 4040. In some embodiments, the alpha VJ sequence is SEQ ID NO: 3736 and the beta V(D)J sequence is SEQ ID NO: 4041. In some embodiments, the alpha VJ sequence is SEQ ID NO: 3737 and the beta V(D)J sequence is SEQ ID NO: 4042. In some embodiments, the alpha VJ sequence is SEQ ID NO: 3738 and the beta V(D)J sequence is SEQ ID NO: 3963. In some embodiments, the alpha VJ sequence is SEQ ID NO: 3659 and the beta V(D)J sequence is SEQ ID NO: 3973. In some embodiments, the alpha VJ sequence is SEQ ID NO: 3660 and the beta V(D)J sequence is SEQ ID NO: 3963. In some embodiments, the alpha VJ sequence is SEQ ID NO: 3739 and the beta V(D)J sequence is SEQ ID NO: 4043. In some embodiments, the alpha VJ sequence is SEQ ID NO: 3740 and the beta V(D)J sequence is SEQ ID NO: 4044. In some embodiments, the alpha VJ sequence is SEQ ID NO: 3741 and the beta V(D)J sequence is SEQ ID NO: 4045. In some embodiments, the alpha VJ sequence is SEQ ID NO: 3657 and the beta V(D)J sequence is SEQ ID NO: 3992. In some embodiments, the alpha VJ sequence is SEQ ID NO: 3742 and the beta V(D)J sequence is SEQ ID NO: 4046. In some embodiments, the alpha VJ sequence is SEQ ID NO: 3666 and the beta V(D)J sequence is SEQ ID NO: 3962. In some embodiments, the alpha VJ sequence is SEQ ID NO: 3711 and the beta V(D)J sequence is SEQ ID NO: 3963. In some embodiments, the alpha VJ sequence is SEQ ID NO: 3660 and the beta V(D)J sequence is SEQ ID NO: 3962. In some embodiments, the alpha VJ sequence is SEQ ID NO: 3663 and the beta V(D)J sequence is SEQ ID NO: 3964. In some embodiments, the alpha VJ sequence is SEQ ID NO: 3743 and the beta V(D)J sequence is SEQ ID NO: 4047. In some embodiments, the alpha VJ sequence is SEQ ID NO: 3744 and the beta V(D)J sequence is SEQ ID NO: 4048. In some embodiments, the alpha VJ sequence is SEQ ID NO: 3745 and the beta V(D)J sequence is SEQ ID NO: 4049. In some embodiments, the alpha VJ sequence is SEQ ID NO: 3746 and the beta V(D)J sequence is SEQ ID NO: 4050. In some embodiments, the alpha VJ sequence is SEQ ID NO: 3747 and the beta V(D)J sequence is SEQ ID NO: 4051. In some embodiments, the alpha VJ sequence is SEQ ID NO: 3748 and the beta V(D)J sequence is SEQ ID NO: 4052. In some embodiments, the alpha VJ sequence is SEQ ID NO: 3749 and the beta V(D)J sequence is SEQ ID NO: 4053. In some embodiments, the alpha VJ sequence is SEQ ID NO: 3750 and the beta V(D)J sequence is SEQ ID NO: 4054. In some embodiments, the alpha VJ sequence is SEQ ID NO: 3751 and the beta V(D)J sequence is SEQ ID NO: 4055. In some embodiments, the alpha VJ sequence is SEQ ID NO: 3752 and the beta V(D)J sequence is SEQ ID NO: 4056. In some embodiments, the alpha VJ sequence is SEQ ID NO: 3753 and the beta V(D)J sequence is SEQ ID NO: 4057. In some embodiments, the alpha VJ sequence is SEQ ID NO: 3754 and the beta V(D)J sequence is SEQ ID NO: 4058. In some embodiments, the alpha VJ sequence is SEQ ID NO: 3755 and the beta V(D)J sequence is SEQ ID NO: 4057. In some embodiments, the alpha VJ sequence is SEQ ID NO: 3756 and the beta V(D)J sequence is SEQ ID NO: 4059. In some embodiments, the alpha VJ sequence is SEQ ID NO: 3757 and the beta V(D)J sequence is SEQ ID NO: 4060. In some embodiments, the alpha VJ sequence is SEQ ID NO: 3758 and the beta V(D)J sequence is SEQ ID NO: 4061. In some embodiments, the alpha VJ sequence is SEQ ID NO: 3759 and the beta V(D)J sequence is SEQ ID NO: 4062. In some embodiments, the alpha VJ sequence is SEQ ID NO: 3760 and the beta V(D)J sequence is SEQ ID NO: 4063. In some embodiments, the alpha VJ sequence is SEQ ID NO: 3761 and the beta V(D)J sequence is SEQ ID NO: 4049. In some embodiments, the alpha VJ sequence is SEQ ID NO: 3748 and the beta V(D)J sequence is SEQ ID NO: 4049. In some embodiments, the alpha VJ sequence is SEQ ID NO: 3762 and the beta V(D)J sequence is SEQ ID NO: 4064. In some embodiments, the alpha VJ sequence is SEQ ID NO: 3763 and the beta V(D)J sequence is SEQ ID NO: 4065. In some embodiments, the alpha VJ sequence is SEQ ID NO: 3764 and the beta V(D)J sequence is SEQ ID NO: 4066. In some embodiments, the alpha VJ sequence is SEQ ID NO: 3765 and the beta V(D)J sequence is SEQ ID NO: 4067. In some embodiments, the alpha VJ sequence is SEQ ID NO: 3746 and the beta V(D)J sequence is SEQ ID NO: 4053. In some embodiments, the alpha VJ sequence is SEQ ID NO: 3766 and the beta V(D)J sequence is SEQ ID NO: 4068. In some embodiments, the alpha VJ sequence is SEQ ID NO: 3761 and the beta V(D)J sequence is SEQ ID NO: 4069. In some embodiments, the alpha VJ sequence is SEQ ID NO: 3767 and the beta V(D)J sequence is SEQ ID NO: 4070. In some embodiments, the alpha VJ sequence is SEQ ID NO: 3768 and the beta V(D)J sequence is SEQ ID NO: 4071. In some embodiments, the alpha VJ sequence is SEQ ID NO: 3769 and the beta V(D)J sequence is SEQ ID NO: 4072. In some embodiments, the alpha VJ sequence is SEQ ID NO: 3770 and the beta V(D)J sequence is SEQ ID NO: 4073. In some embodiments, the alpha VJ sequence is SEQ ID NO: 3771 and the beta V(D)J sequence is SEQ ID NO: 4074. In some embodiments, the alpha VJ sequence is SEQ ID NO: 3772 and the beta V(D)J sequence is SEQ ID NO: 4075. In some embodiments, the alpha VJ sequence is SEQ ID NO: 3773 and the beta V(D)J sequence is SEQ ID NO: 4076. In some embodiments, the alpha VJ sequence is SEQ ID NO: 3774 and the beta V(D)J sequence is SEQ ID NO: 4077. In some embodiments, the alpha VJ sequence is SEQ ID NO: 3775 and the beta V(D)J sequence is SEQ ID NO: 4078. In some embodiments, the alpha VJ sequence is SEQ ID NO: 3746 and the beta V(D)J sequence is SEQ ID NO: 4055. In some embodiments, the alpha VJ sequence is SEQ ID NO: 3745 and the beta V(D)J sequence is SEQ ID NO: 4051. In some embodiments, the alpha VJ sequence is SEQ ID NO: 3776 and the beta V(D)J sequence is SEQ ID NO: 4079. In some embodiments, the alpha VJ sequence is SEQ ID NO: 3777 and the beta V(D)J sequence is SEQ ID NO: 4080. In some embodiments, the alpha VJ sequence is SEQ ID NO: 3778 and the beta V(D)J sequence is SEQ ID NO: 4081. In some embodiments, the alpha VJ sequence is SEQ ID NO: 3779 and the beta V(D)J sequence is SEQ ID NO: 4082. In some embodiments, the alpha VJ sequence is SEQ ID NO: 3780 and the beta V(D)J sequence is SEQ ID NO: 4083. In some embodiments, the alpha VJ sequence is SEQ ID NO: 3746 and the beta V(D)J sequence is SEQ ID NO: 4049. In some embodiments, the alpha VJ sequence is SEQ ID NO: 3781 and the beta V(D)J sequence is SEQ ID NO: 4084. In some embodiments, the alpha VJ sequence is SEQ ID NO: 3782 and the beta V(D)J sequence is SEQ ID NO: 4085. In some embodiments, the alpha VJ sequence is SEQ ID NO: 3783 and the beta V(D)J sequence is SEQ ID NO: 4086. In some embodiments, the alpha VJ sequence is SEQ ID NO: 3784 and the beta V(D)J sequence is SEQ ID NO: 4087. In some embodiments, the alpha VJ sequence is SEQ ID NO: 3785 and the beta V(D)J sequence is SEQ ID NO: 4088. In some embodiments, the alpha VJ sequence is SEQ ID NO: 3786 and the beta V(D)J sequence is SEQ ID NO: 4089. In some embodiments, the alpha VJ sequence is SEQ ID NO: 3787 and the beta V(D)J sequence is SEQ ID NO: 4090. In some embodiments, the alpha VJ sequence is SEQ ID NO: 3788 and the beta V(D)J sequence is SEQ ID NO: 4091. In some embodiments, the alpha VJ sequence is SEQ ID NO: 3789 and the beta V(D)J sequence is SEQ ID NO: 4092. In some embodiments, the alpha VJ sequence is SEQ ID NO: 3790 and the beta V(D)J sequence is SEQ ID NO: 4093. In some embodiments, the alpha VJ sequence is SEQ ID NO: 3791 and the beta V(D)J sequence is SEQ ID NO: 4094. In some embodiments, the alpha VJ sequence is SEQ ID NO: 3755 and the beta V(D)J sequence is SEQ ID NO: 4095. In some embodiments, the alpha VJ sequence is SEQ ID NO: 3792 and the beta V(D)J sequence is SEQ ID NO: 4096. In some embodiments, the alpha VJ sequence is SEQ ID NO: 3793 and the beta V(D)J sequence is SEQ ID NO: 4097. In some embodiments, the alpha VJ sequence is SEQ ID NO: 3794 and the beta V(D)J sequence is SEQ ID NO: 4098. In some embodiments, the alpha VJ sequence is SEQ ID NO: 3795 and the beta V(D)J sequence is SEQ ID NO: 4099. In some embodiments, the alpha VJ sequence is SEQ ID NO: 3796 and the beta V(D)J sequence is SEQ ID NO: 4100. In some embodiments, the alpha VJ sequence is SEQ ID NO: 3797 and the beta V(D)J sequence is SEQ ID NO: 4101. In some embodiments, the alpha VJ sequence is SEQ ID NO: 3798 and the beta V(D)J sequence is SEQ ID NO: 4102. In some embodiments, the alpha VJ sequence is SEQ ID NO: 3799 and the beta V(D)J sequence is SEQ ID NO: 4095. In some embodiments, the alpha VJ sequence is SEQ ID NO: 3800 and the beta V(D)J sequence is SEQ ID NO: 4103. In some embodiments, the alpha VJ sequence is SEQ ID NO: 3801 and the beta V(D)J sequence is SEQ ID NO: 4104. In some embodiments, the alpha VJ sequence is SEQ ID NO: 3802 and the beta V(D)J sequence is SEQ ID NO: 4105. In some embodiments, the alpha VJ sequence is SEQ ID NO: 3803 and the beta V(D)J sequence is SEQ ID NO: 4106. In some embodiments, the alpha VJ sequence is SEQ ID NO: 3804 and the beta V(D)J sequence is SEQ ID NO: 4107. In some embodiments, the alpha VJ sequence is SEQ ID NO: 3805 and the beta V(D)J sequence is SEQ ID NO: 4108. In some embodiments, the alpha VJ sequence is SEQ ID NO: 3806 and the beta V(D)J sequence is SEQ ID NO: 4109. In some embodiments, the alpha VJ sequence is SEQ ID NO: 3807 and the beta V(D)J sequence is SEQ ID NO: 4110. In some embodiments, the alpha VJ sequence is SEQ ID NO: 3808 and the beta V(D)J sequence is SEQ ID NO: 4111. In some embodiments, the alpha VJ sequence is SEQ ID NO: 3809 and the beta V(D)J sequence is SEQ ID NO: 4112. In some embodiments, the alpha VJ sequence is SEQ ID NO: 3810 and the beta V(D)J sequence is SEQ ID NO: 4113. In some embodiments, the alpha VJ sequence is SEQ ID NO: 3746 and the beta V(D)J sequence is SEQ ID NO: 4062. In some embodiments, the alpha VJ sequence is SEQ ID NO: 3811 and the beta V(D)J sequence is SEQ ID NO: 4049. In some embodiments, the alpha VJ sequence is SEQ ID NO: 3812 and the beta V(D)J sequence is SEQ ID NO: 4114. In some embodiments, the alpha VJ sequence is SEQ ID NO: 3747 and the beta V(D)J sequence is SEQ ID NO: 4049. In some embodiments, the alpha VJ sequence is SEQ ID NO: 3813 and the beta V(D)J sequence is SEQ ID NO: 4115. In some embodiments, the alpha VJ sequence is SEQ ID NO: 3814 and the beta V(D)J sequence is SEQ ID NO: 4116. In some embodiments, the alpha VJ sequence is SEQ ID NO: 3815 and the beta V(D)J sequence is SEQ ID NO: 4117. In some embodiments, the alpha VJ sequence is SEQ ID NO: 3816 and the beta V(D)J sequence is SEQ ID NO: 4118. In some embodiments, the alpha VJ sequence is SEQ ID NO: 3817 and the beta V(D)J sequence is SEQ ID NO: 4119. In some embodiments, the alpha VJ sequence is SEQ ID NO: 3818 and the beta V(D)J sequence is SEQ ID NO: 4120. In some embodiments, the alpha VJ sequence is SEQ ID NO: 3758 and the beta V(D)J sequence is SEQ ID NO: 4053. In some embodiments, the alpha VJ sequence is SEQ ID NO: 3819 and the beta V(D)J sequence is SEQ ID NO: 4121. In some embodiments, the alpha VJ sequence is SEQ ID NO: 3820 and the beta V(D)J sequence is SEQ ID NO: 4122. In some embodiments, the alpha VJ sequence is SEQ ID NO: 3821 and the beta V(D)J sequence is SEQ ID NO: 4123. In some embodiments, the alpha VJ sequence is SEQ ID NO: 3822 and the beta V(D)J sequence is SEQ ID NO: 4124. In some embodiments, the alpha VJ sequence is SEQ ID NO: 3823 and the beta V(D)J sequence is SEQ ID NO: 4125. In some embodiments, the alpha VJ sequence is SEQ ID NO: 3824 and the beta V(D)J sequence is SEQ ID NO: 4126. In some embodiments, the alpha VJ sequence is SEQ ID NO: 3825 and the beta V(D)J sequence is SEQ ID NO: 4127. In some embodiments, the alpha VJ sequence is SEQ ID NO: 3826 and the beta V(D)J sequence is SEQ ID NO: 4128. In some embodiments, the alpha VJ sequence is SEQ ID NO: 3827 and the beta V(D)J sequence is SEQ ID NO: 4129. In some embodiments, the alpha VJ sequence is SEQ ID NO: 3828 and the beta V(D)J sequence is SEQ ID NO: 4130. In some embodiments, the alpha VJ sequence is SEQ ID NO: 3829 and the beta V(D)J sequence is SEQ ID NO: 4131. In some embodiments, the alpha VJ sequence is SEQ ID NO: 3830 and the beta V(D)J sequence is SEQ ID NO: 4132. In some embodiments, the alpha VJ sequence is SEQ ID NO: 3831 and the beta V(D)J sequence is SEQ ID NO: 4133. In some embodiments, the alpha VJ sequence is SEQ ID NO: 3832 and the beta V(D)J sequence is SEQ ID NO: 4134. In some embodiments, the alpha VJ sequence is SEQ ID NO: 3828 and the beta V(D)J sequence is SEQ ID NO: 4131. In some embodiments, the alpha VJ sequence is SEQ ID NO: 3833 and the beta V(D)J sequence is SEQ ID NO: 4135. In some embodiments, the alpha VJ sequence is SEQ ID NO: 3834 and the beta V(D)J sequence is SEQ ID NO: 4136. In some embodiments, the alpha VJ sequence is SEQ ID NO: 3835 and the beta V(D)J sequence is SEQ ID NO: 4137. In some embodiments, the alpha VJ sequence is SEQ ID NO: 3836 and the beta V(D)J sequence is SEQ ID NO: 4138. In some embodiments, the alpha VJ sequence is SEQ ID NO: 3837 and the beta V(D)J sequence is SEQ ID NO: 4139. In some embodiments, the alpha VJ sequence is SEQ ID NO: 3838 and the beta V(D)J sequence is SEQ ID NO: 4140. In some embodiments, the alpha VJ sequence is SEQ ID NO: 3839 and the beta V(D)J sequence is SEQ ID NO: 4141. In some embodiments, the alpha VJ sequence is SEQ ID NO: 3840 and the beta V(D)J sequence is SEQ ID NO: 4142. In some embodiments, the alpha VJ sequence is SEQ ID NO: 3841 and the beta V(D)J sequence is SEQ ID NO: 4143. In some embodiments, the alpha VJ sequence is SEQ ID NO: 3828 and the beta V(D)J sequence is SEQ ID NO: 4138. In some embodiments, the alpha VJ sequence is SEQ ID NO: 3842 and the beta V(D)J sequence is SEQ ID NO: 4144. In some embodiments, the alpha VJ sequence is SEQ ID NO: 3843 and the beta V(D)J sequence is SEQ ID NO: 4145. In some embodiments, the alpha VJ sequence is SEQ ID NO: 3844 and the beta V(D)J sequence is SEQ ID NO: 4133. In some embodiments, the alpha VJ sequence is SEQ ID NO: 3828 and the beta V(D)J sequence is SEQ ID NO: 4143. In some embodiments, the alpha VJ sequence is SEQ ID NO: 3845 and the beta V(D)J sequence is SEQ ID NO: 4146. In some embodiments, the alpha VJ sequence is SEQ ID NO: 3846 and the beta V(D)J sequence is SEQ ID NO: 4147. In some embodiments, the alpha VJ sequence is SEQ ID NO: 3828 and the beta V(D)J sequence is SEQ ID NO: 4145. In some embodiments, the alpha VJ sequence is SEQ ID NO: 3847 and the beta V(D)J sequence is SEQ ID NO: 4148. In some embodiments, the alpha VJ sequence is SEQ ID NO: 3848 and the beta V(D)J sequence is SEQ ID NO: 4149. In some embodiments, the alpha VJ sequence is SEQ ID NO: 3849 and the beta V(D)J sequence is SEQ ID NO: 4150. In some embodiments, the alpha VJ sequence is SEQ ID NO: 3850 and the beta V(D)J sequence is SEQ ID NO: 4151. In some embodiments, the alpha VJ sequence is SEQ ID NO: 3851 and the beta V(D)J sequence is SEQ ID NO: 4152. In some embodiments, the alpha VJ sequence is SEQ ID NO: 3852 and the beta V(D)J sequence is SEQ ID NO: 4153. In some embodiments, the alpha VJ sequence is SEQ ID NO: 3853 and the beta V(D)J sequence is SEQ ID NO: 4154. In some embodiments, the alpha VJ sequence is SEQ ID NO: 3854 and the beta V(D)J sequence is SEQ ID NO: 4155. In some embodiments, the alpha VJ sequence is SEQ ID NO: 3855 and the beta V(D)J sequence is SEQ ID NO: 4156. In some embodiments, the alpha VJ sequence is SEQ ID NO: 3831 and the beta V(D)J sequence is SEQ ID NO: 4157. In some embodiments, the alpha VJ sequence is SEQ ID NO: 3856 and the beta V(D)J sequence is SEQ ID NO: 4158. In some embodiments, the alpha VJ sequence is SEQ ID NO: 3857 and the beta V(D)J sequence is SEQ ID NO: 4159. In some embodiments, the alpha VJ sequence is SEQ ID NO: 3858 and the beta V(D)J sequence is SEQ ID NO: 4160. In some embodiments, the alpha VJ sequence is SEQ ID NO: 3859 and the beta V(D)J sequence is SEQ ID NO: 4161. In some embodiments, the alpha VJ sequence is SEQ ID NO: 3828 and the beta V(D)J sequence is SEQ ID NO: 4137. In some embodiments, the alpha VJ sequence is SEQ ID NO: 3860 and the beta V(D)J sequence is SEQ ID NO: 4162. In some embodiments, the alpha VJ sequence is SEQ ID NO: 3861 and the beta V(D)J sequence is SEQ ID NO: 4163. In some embodiments, the alpha VJ sequence is SEQ ID NO: 3862 and the beta V(D)J sequence is SEQ ID NO: 4164. In some embodiments, the alpha VJ sequence is SEQ ID NO: 3863 and the beta V(D)J sequence is SEQ ID NO: 4165. In some embodiments, the alpha VJ sequence is SEQ ID NO: 3864 and the beta V(D)J sequence is SEQ ID NO: 4166. In some embodiments, the alpha VJ sequence is SEQ ID NO: 3865 and the beta V(D)J sequence is SEQ ID NO: 4167. In some embodiments, the alpha VJ sequence is SEQ ID NO: 3866 and the beta V(D)J sequence is SEQ ID NO: 4168. In some embodiments, the alpha VJ sequence is SEQ ID NO: 3867 and the beta V(D)J sequence is SEQ ID NO: 4169. In some embodiments, the alpha VJ sequence is SEQ ID NO: 3868 and the beta V(D)J sequence is SEQ ID NO: 4170. In some embodiments, the alpha VJ sequence is SEQ ID NO: 3869 and the beta V(D)J sequence is SEQ ID NO: 4171. In some embodiments, the alpha VJ sequence is SEQ ID NO: 3870 and the beta V(D)J sequence is SEQ ID NO: 4172. In some embodiments, the alpha VJ sequence is SEQ ID NO: 3871 and the beta V(D)J sequence is SEQ ID NO: 4173. In some embodiments, the alpha VJ sequence is SEQ ID NO: 3828 and the beta V(D)J sequence is SEQ ID NO: 4132. In some embodiments, the alpha VJ sequence is SEQ ID NO: 3872 and the beta V(D)J sequence is SEQ ID NO: 4174. In some embodiments, the alpha VJ sequence is SEQ ID NO: 3873 and the beta V(D)J sequence is SEQ ID NO: 4175. In some embodiments, the alpha VJ sequence is SEQ ID NO: 3828 and the beta V(D)J sequence is SEQ ID NO: 4176. In some embodiments, the alpha VJ sequence is SEQ ID NO: 3874 and the beta V(D)J sequence is SEQ ID NO: 4177. In some embodiments, the alpha VJ sequence is SEQ ID NO: 3875 and the beta V(D)J sequence is SEQ ID NO: 4178. In some embodiments, the alpha VJ sequence is SEQ ID NO: 3876 and the beta V(D)J sequence is SEQ ID NO: 4179. In some embodiments, the alpha VJ sequence is SEQ ID NO: 3877 and the beta V(D)J sequence is SEQ ID NO: 4180. In some embodiments, the alpha VJ sequence is SEQ ID NO: 3878 and the beta V(D)J sequence is SEQ ID NO: 4181. In some embodiments, the alpha VJ sequence is SEQ ID NO: 3879 and the beta V(D)J sequence is SEQ ID NO: 4182. In some embodiments, the alpha VJ sequence is SEQ ID NO: 3828 and the beta V(D)J sequence is SEQ ID NO: 4141. In some embodiments, the alpha VJ sequence is SEQ ID NO: 3880 and the beta V(D)J sequence is SEQ ID NO: 4183. In some embodiments, the alpha VJ sequence is SEQ ID NO: 3828 and the beta V(D)J sequence is SEQ ID NO: 4184. In some embodiments, the alpha VJ sequence is SEQ ID NO: 3881 and the beta V(D)J sequence is SEQ ID NO: 4185. In some embodiments, the alpha VJ sequence is SEQ ID NO: 3830 and the beta V(D)J sequence is SEQ ID NO: 4135. In some embodiments, the alpha VJ sequence is SEQ ID NO: 3882 and the beta V(D)J sequence is SEQ ID NO: 4186. In some embodiments, the alpha VJ sequence is SEQ ID NO: 3883 and the beta V(D)J sequence is SEQ ID NO: 4187. In some embodiments, the alpha VJ sequence is SEQ ID NO: 3884 and the beta V(D)J sequence is SEQ ID NO: 4188. In some embodiments, the alpha VJ sequence is SEQ ID NO: 3885 and the beta V(D)J sequence is SEQ ID NO: 4189. In some embodiments, the alpha VJ sequence is SEQ ID NO: 3828 and the beta V(D)J sequence is SEQ ID NO: 4190. In some embodiments, the alpha VJ sequence is SEQ ID NO: 3841 and the beta V(D)J sequence is SEQ ID NO: 4130. In some embodiments, the alpha VJ sequence is SEQ ID NO: 3886 and the beta V(D)J sequence is SEQ ID NO: 4191. In some embodiments, the alpha VJ sequence is SEQ ID NO: 3887 and the beta V(D)J sequence is SEQ ID NO: 4192. In some embodiments, the alpha VJ sequence is SEQ ID NO: 3888 and the beta V(D)J sequence is SEQ ID NO: 4193. In some embodiments, the alpha VJ sequence is SEQ ID NO: 3889 and the beta V(D)J sequence is SEQ ID NO: 4194. In some embodiments, the alpha VJ sequence is SEQ ID NO: 3890 and the beta V(D)J sequence is SEQ ID NO: 4195. In some embodiments, the alpha VJ sequence is SEQ ID NO: 3891 and the beta V(D)J sequence is SEQ ID NO: 4196. In some embodiments, the alpha VJ sequence is SEQ ID NO: 3892 and the beta V(D)J sequence is SEQ ID NO: 4197. In some embodiments, the alpha VJ sequence is SEQ ID NO: 3893 and the beta V(D)J sequence is SEQ ID NO: 4198. In some embodiments, the alpha VJ sequence is SEQ ID NO: 3894 and the beta V(D)J sequence is SEQ ID NO: 4199. In some embodiments, the alpha VJ sequence is SEQ ID NO: 3895 and the beta V(D)J sequence is SEQ ID NO: 4200. In some embodiments, the alpha VJ sequence is SEQ ID NO: 3896 and the beta V(D)J sequence is SEQ ID NO: 4201. In some embodiments, the alpha VJ sequence is SEQ ID NO: 3897 and the beta V(D)J sequence is SEQ ID NO: 4202. In some embodiments, the alpha VJ sequence is SEQ ID NO: 3898 and the beta V(D)J sequence is SEQ ID NO: 4203. In some embodiments, the alpha VJ sequence is SEQ ID NO: 3899 and the beta V(D)J sequence is SEQ ID NO: 4204. In some embodiments, the alpha VJ sequence is SEQ ID NO: 3900 and the beta V(D)J sequence is SEQ ID NO: 4205. In some embodiments, the alpha VJ sequence is SEQ ID NO: 3901 and the beta V(D)J sequence is SEQ ID NO: 4206. In some embodiments, the alpha VJ sequence is SEQ ID NO: 3902 and the beta V(D)J sequence is SEQ ID NO: 4207. In some embodiments, the alpha VJ sequence is SEQ ID NO: 3903 and the beta V(D)J sequence is SEQ ID NO: 4208. In some embodiments, the alpha VJ sequence is SEQ ID NO: 3904 and the beta V(D)J sequence is SEQ ID NO: 4209. In some embodiments, the alpha VJ sequence is SEQ ID NO: 3905 and the beta V(D)J sequence is SEQ ID NO: 4210. In some embodiments, the alpha VJ sequence is SEQ ID NO: 3830 and the beta V(D)J sequence is SEQ ID NO: 4211. In some embodiments, the alpha VJ sequence is SEQ ID NO: 3906 and the beta V(D)J sequence is SEQ ID NO: 4212. In some embodiments, the alpha VJ sequence is SEQ ID NO: 3828 and the beta V(D)J sequence is SEQ ID NO: 4213. In some embodiments, the alpha VJ sequence is SEQ ID NO: 3907 and the beta V(D)J sequence is SEQ ID NO: 4214. In some embodiments, the alpha VJ sequence is SEQ ID NO: 3908 and the beta V(D)J sequence is SEQ ID NO: 4215. In some embodiments, the alpha VJ sequence is SEQ ID NO: 3909 and the beta V(D)J sequence is SEQ ID NO: 4216. In some embodiments, the alpha VJ sequence is SEQ ID NO: 3910 and the beta V(D)J sequence is SEQ ID NO: 4217. In some embodiments, the alpha VJ sequence is SEQ ID NO: 3911 and the beta V(D)J sequence is SEQ ID NO: 4218. In some embodiments, the alpha VJ sequence is SEQ ID NO: 3912 and the beta V(D)J sequence is SEQ ID NO: 4219. In some embodiments, the alpha VJ sequence is SEQ ID NO: 3913 and the beta V(D)J sequence is SEQ ID NO: 4220. In some embodiments, the alpha VJ sequence is SEQ ID NO: 3914 and the beta V(D)J sequence is SEQ ID NO: 4221. In some embodiments, the alpha VJ sequence is SEQ ID NO: 3915 and the beta V(D)J sequence is SEQ ID NO: 4222. In some embodiments, the alpha VJ sequence is SEQ ID NO: 3916 and the beta V(D)J sequence is SEQ ID NO: 4223. In some embodiments, the alpha VJ sequence is SEQ ID NO: 3917 and the beta V(D)J sequence is SEQ ID NO: 4224. In some embodiments, the alpha VJ sequence is SEQ ID NO: 3899 and the beta V(D)J sequence is SEQ ID NO: 4208. In some embodiments, the alpha VJ sequence is SEQ ID NO: 3918 and the beta V(D)J sequence is SEQ ID NO: 4225. In some embodiments, the alpha VJ sequence is SEQ ID NO: 3919 and the beta V(D)J sequence is SEQ ID NO: 4226. In some embodiments, the alpha VJ sequence is SEQ ID NO: 3920 and the beta V(D)J sequence is SEQ ID NO: 4227. In some embodiments, the alpha VJ sequence is SEQ ID NO: 3921 and the beta V(D)J sequence is SEQ ID NO: 4228. In some embodiments, the alpha VJ sequence is SEQ ID NO: 3922 and the beta V(D)J sequence is SEQ ID NO: 4229. In some embodiments, the alpha VJ sequence is SEQ ID NO: 3923 and the beta V(D)J sequence is SEQ ID NO: 4230. In some embodiments, the alpha VJ sequence is SEQ ID NO: 3924 and the beta V(D)J sequence is SEQ ID NO: 4231. In some embodiments, the alpha VJ sequence is SEQ ID NO: 3899 and the beta V(D)J sequence is SEQ ID NO: 4232. In some embodiments, the alpha VJ sequence is SEQ ID NO: 3925 and the beta V(D)J sequence is SEQ ID NO: 4233. In some embodiments, the alpha VJ sequence is SEQ ID NO: 3926 and the beta V(D)J sequence is SEQ ID NO: 4234. In some embodiments, the alpha VJ sequence is SEQ ID NO: 3927 and the beta V(D)J sequence is SEQ ID NO: 4235. In some embodiments, the alpha VJ sequence is SEQ ID NO: 3928 and the beta V(D)J sequence is SEQ ID NO: 4236. In some embodiments, the alpha VJ sequence is SEQ ID NO: 3929 and the beta V(D)J sequence is SEQ ID NO: 4237. In some embodiments, the alpha VJ sequence is SEQ ID NO: 3930 and the beta V(D)J sequence is SEQ ID NO: 4238. In some embodiments, the alpha VJ sequence is SEQ ID NO: 3931 and the beta V(D)J sequence is SEQ ID NO: 4239. In some embodiments, the alpha VJ sequence is SEQ ID NO: 3932 and the beta V(D)J sequence is SEQ ID NO: 4240. In some embodiments, the alpha VJ sequence is SEQ ID NO: 3933 and the beta V(D)J sequence is SEQ ID NO: 4241. In some embodiments, the alpha VJ sequence is SEQ ID NO: 3934 and the beta V(D)J sequence is SEQ ID NO: 4242. In some embodiments, the alpha VJ sequence is SEQ ID NO: 3935 and the beta V(D)J sequence is SEQ ID NO: 4215. In some embodiments, the alpha VJ sequence is SEQ ID NO: 3936 and the beta V(D)J sequence is SEQ ID NO: 4243. In some embodiments, the alpha VJ sequence is SEQ ID NO: 3937 and the beta V(D)J sequence is SEQ ID NO: 4244. In some embodiments, the alpha VJ sequence is SEQ ID NO: 3938 and the beta V(D)J sequence is SEQ ID NO: 4245. In some embodiments, the alpha VJ sequence is SEQ ID NO: 3899 and the beta V(D)J sequence is SEQ ID NO: 4211. In some embodiments, the alpha VJ sequence is SEQ ID NO: 3939 and the beta V(D)J sequence is SEQ ID NO: 4246. In some embodiments, the alpha VJ sequence is SEQ ID NO: 3940 and the beta V(D)J sequence is SEQ ID NO: 4247. In some embodiments, the alpha VJ sequence is SEQ ID NO: 3941 and the beta V(D)J sequence is SEQ ID NO: 4248. In some embodiments, the alpha VJ sequence is SEQ ID NO: 3942 and the beta V(D)J sequence is SEQ ID NO: 4249. In some embodiments, the alpha VJ sequence is SEQ ID NO: 3943 and the beta V(D)J sequence is SEQ ID NO: 4250. In some embodiments, the alpha VJ sequence is SEQ ID NO: 3944 and the beta V(D)J sequence is SEQ ID NO: 4251. In some embodiments, the alpha VJ sequence is SEQ ID NO: 3945 and the beta V(D)J sequence is SEQ ID NO: 4252. In some embodiments, the alpha VJ sequence is SEQ ID NO: 3946 and the beta V(D)J sequence is SEQ ID NO: 4253. In some embodiments, the alpha VJ sequence is SEQ ID NO: 3947 and the beta V(D)J sequence is SEQ ID NO: 4254. In some embodiments, the alpha VJ sequence is SEQ ID NO: 3948 and the beta V(D)J sequence is SEQ ID NO: 4255. In some embodiments, the alpha VJ sequence is SEQ ID NO: 3900 and the beta V(D)J sequence is SEQ ID NO: 4209. In some embodiments, the alpha VJ sequence is SEQ ID NO: 3949 and the beta V(D)J sequence is SEQ ID NO: 4256. In some embodiments, the alpha VJ sequence is SEQ ID NO: 3900 and the beta V(D)J sequence is SEQ ID NO: 4214. In some embodiments, the alpha VJ sequence is SEQ ID NO: 3950 and the beta V(D)J sequence is SEQ ID NO: 4257. In some embodiments, the alpha VJ sequence is SEQ ID NO: 3899 and the beta V(D)J sequence is SEQ ID NO: 4224. In some embodiments, the alpha VJ sequence is SEQ ID NO: 3951 and the beta V(D)J sequence is SEQ ID NO: 4258. In some embodiments, the alpha VJ sequence is SEQ ID NO: 3952 and the beta V(D)J sequence is SEQ ID NO: 4259. In some embodiments, the alpha VJ sequence is SEQ ID NO: 3953 and the beta V(D)J sequence is SEQ ID NO: 4260. In some embodiments, the alpha VJ sequence is SEQ ID NO: 3751 and the beta V(D)J sequence is SEQ ID NO: 4261. In some embodiments, the alpha VJ sequence is SEQ ID NO: 3954 and the beta V(D)J sequence is SEQ ID NO: 4262. In some embodiments, the alpha VJ sequence is SEQ ID NO: 3955 and the beta V(D)J sequence is SEQ ID NO: 4263. In some embodiments, the alpha VJ sequence is SEQ ID NO: 3956 and the beta V(D)J sequence is SEQ ID NO: 4264. In some embodiments, the alpha VJ sequence is SEQ ID NO: 3957 and the beta V(D)J sequence is SEQ ID NO: 4265. In some embodiments, the alpha VJ sequence is SEQ ID NO: 3958 and the beta V(D)J sequence is SEQ ID NO: 4266. In some embodiments, the alpha VJ sequence is SEQ ID NO: 3959 and the beta V(D)J sequence is SEQ ID NO: 4267. In some embodiments, the alpha VJ sequence is SEQ ID NO: 3960 and the beta V(D)J sequence is SEQ ID NO: 4268. In some embodiments, the alpha VJ sequence is SEQ ID NO: 3961 and the beta V(D)J sequence is SEQ ID NO: 4269. In some embodiments, the alpha VJ sequence is SEQ ID NO: 4302 and the beta V(D)J sequence is SEQ ID NO: 4317. In some embodiments, the alpha VJ sequence is SEQ ID NO: 4303 and the beta V(D)J sequence is SEQ ID NO: 4318. In some embodiments, the alpha VJ sequence is SEQ ID NO: 4304 and the beta V(D)J sequence is SEQ ID NO: 4319. In some embodiments, the alpha VJ sequence is SEQ ID NO: 4305 and the beta V(D)J sequence is SEQ ID NO: 4320.

[0335] Target-Specific TCRs to B *44:02 GEMSSNSTAL (SEQ ID NO: 4272)

[0336] In some aspects, provided herein are ABPs comprising TCRs or antigen-binding fragments thereof that specifically bind an HLA-PEPTIDE target, wherein the HLA Class I molecule of the HLA-PEPTIDE target is HLA subtype B*44:02 and the HLA-restricted peptide of the HLA-PEPTIDE target comprises the sequence GEMSSNSTAL (SEQ ID NO: 4272).

[0337] The TCR specific for B*44:02_GEMSSNSTAL (SEQ ID NO: 4272) may comprise an αCDR3 sequence. The αCDR3 sequence may be any one of SEQ ID NOS 4284-4286 or 3138.

[0338] The TCR specific for B*44:02_GEMSSNSTAL (SEQ ID NO: 4272) may comprise a βCDR3 sequence. The βCDR3 sequence may be any one of SEQ ID NOS 4298-4301.

[0339] The TCR specific for B*44:02_GEMSSNSTAL (SEQ ID NO: 4272) may comprise a particular αCDR3 sequence and a particular βCDR3 sequence. The αCDR3 may be SEQ ID NO: 4284 and the βCDR3 may be SEQ ID NO: 4298. The αCDR3 may be SEQ ID NO: 4285 and the βCDR3 may be SEQ ID NO: 4299. The αCDR3 may be SEQ ID NO: 4286 and the βCDR3 may be SEQ ID NO: 4300. The αCDR3 may be SEQ ID NO: 3138 and the βCDR3 may be SEQ ID NO: 4301.

[0340] The TCR specific for B*44:02_GEMSSNSTAL (SEQ ID NO: 4272) may comprise a TRAV, a TRAJ, a TRBV, optionally a TRBD, and a TRBJ amino acid sequence, optionally a TRAC sequence and optionally a TRBC sequence. Such TCR may comprise TRAV19, TRAJ39, TRBV7-6, TRBD1, and TRBJ1-1. Such TCR may comprise TRAV36DV7, TRAJ34, TRBV7-6, TRBD2, and TRBJ2-2. Such TCR may comprise TRAV24, TRAJ15, TRBV7-6, TRBD2, and TRBJ2-1. Such TCR may comprise TRAV8-4, TRAJ12, TRBV12-4, TRBD2, and TRBJ2-3.

[0341] The TCR specific for B*44:02_GEMSSNSTAL (SEQ ID NO: 4272) may comprise an alpha VJ sequence. The alpha VJ sequence may be any one of SEQ ID NOS 4313-4316.

[0342] The TCR specific for B*44:02_GEMSSNSTAL (SEQ ID NO: 4272) may comprise a beta V(D)J sequence. The beta V(D)J sequence may be any one of SEQ ID NOS 4328-4331.

[0343] In some embodiments, the alpha VJ sequence is SEQ ID NO: 4313 and the beta V(D)J sequence is SEQ ID NO: 4328. In some embodiments, the alpha VJ sequence is SEQ ID NO: 4314 and the beta V(D)J sequence is SEQ ID NO: 4329. In some embodiments, the alpha VJ sequence is SEQ ID NO: 4315 and the beta V(D)J sequence is SEQ ID NO: 4330. In some embodiments, the alpha VJ sequence is SEQ ID NO: 4316 and the beta V(D)J sequence is SEQ ID NO: 4331.

[0344] Target-Specific TCRs to A *02:01_GVYDGEEHSV (SEQ ID NO: 4271)

[0345] In some aspects, provided herein are ABPs comprising TCRs or antigen-binding fragments thereof that specifically bind an HLA-PEPTIDE target, wherein the HLA Class I molecule of the HLA-PEPTIDE target is HLA subtype A*02:01 and the HLA-restricted peptide of the HLA-PEPTIDE target comprises the sequence GVYDGEEHSV (SEQ ID NO: 4271).

[0346] The TCR specific for A*02:01_GVYDGEEHSV (SEQ ID NO: 4271) may comprise an αCDR3 sequence. The αCDR3 sequence may be any one of SEQ ID NOS 4282-4283.

[0347] The TCR specific for A*02:01_GVYDGEEHSV (SEQ ID NO: 4271) may comprise a βCDR3 sequence. The βCDR3 sequence may be any one of SEQ ID NOS 4296-4297.

[0348] The TCR specific for A*02:01_GVYDGEEHSV (SEQ ID NO: 4271) may comprise a particular αCDR3 sequence and a particular βCDR3 sequence. The αCDR3 may be SEQ ID NO: 4282 and the βCDR3 may be SEQ ID NO: 4296. The αCDR3 may be SEQ ID NO: 4283 and the βCDR3 may be SEQ ID NO: 4297.

[0349] The TCR specific for A*02:01_GVYDGEEHSV (SEQ ID NO: 4271) may comprise a TRAV, a TRAJ, a TRBV, optionally a TRBD, and a TRBJ amino acid sequence, optionally a TRAC sequence and optionally a TRBC sequence. Such TCR may comprise TRAV13-1, TRAJ11, TRBV6-3, and TRBJ2-1. Such TCR may comprise TRAV14DV4, TRAJ54, TRBV4-3, TRBD1, and TRBJ2-4.

[0350] The TCR specific for A*02:01_GVYDGEEHSV (SEQ ID NO: 4271) may comprise an alpha VJ sequence. The alpha VJ sequence may be any one of SEQ ID NOS 4311-4312.

[0351] The TCR specific for A*02:01_GVYDGEEHSV (SEQ ID NO: 4271) may comprise a beta V(D)J sequence. The beta V(D)J sequence may be any one of SEQ ID NOS 4326-4327.

[0352] In some embodiments, the alpha VJ sequence is SEQ ID NO: 4311 and the beta V(D)J sequence is SEQ ID NO: 4326. In some embodiments, the alpha VJ sequence is SEQ ID NO: 4312 and the beta V(D)J sequence is SEQ ID NO: 4327.

### Engineered Cells

[0353] Also provided are cells such as cells that contain an antigen receptor, e.g., that contains an extracellular domain including an anti-HLA-PEPTIDE ABP (e.g., a CAR or TCR), described herein. Also provided are populations of such cells, and compositions containing such cells. In some embodiments, compositions or populations are enriched for such cells, such as in which cells expressing the HLA-PEPTIDE ABP make up at least 1, 5, 10, 20, 30, 40, 50, 60, 70, 80, 90, 91, 92, 93, 94, 95, 96, 97, 98, 99, or more than 99 percent of the total cells in the composition or cells of a certain type such as T cells or CD8+ or CD4+ cells. In some embodiments, a composition comprises at least one cell containing an antigen receptor disclosed herein. Among the compositions are pharmaceutical compositions and formulations for administration, such as for adoptive cell therapy. Also provided are therapeutic methods for administering the cells and compositions to subjects, e.g., patients.

[0354] Thus also provided are genetically engineered cells expressing an ABP comprising a receptor, e.g., a TCR or CAR. The cells generally are eukaryotic cells, such as mammalian cells, and typically are human cells. In some embodiments, the cells are derived from the blood, bone marrow, lymph, or lymphoid organs, are cells of the immune system, such as cells of the innate or adaptive immunity, e.g., myeloid or lymphoid cells, including lymphocytes, typically T cells and/or NK cells. Other exemplary cells include stem cells, such as multipotent and pluripotent stem cells, including induced pluripotent stem cells (iPSCs). The cells typically are primary cells, such as those isolated directly from a subject and/or isolated from a subject and frozen. In some embodiments, the cells include one or more subsets of T cells or other cell types, such as whole T cell populations, CD4+ cells, CD8+ cells, and subpopulations thereof, such as those defined by function, activation state, maturity, potential for differentiation, expansion, recirculation, localization, and/or persistence capacities, antigen-specificity, type of antigen receptor, presence in a particular organ or compartment, marker or cytokine secretion profile, and/or degree of differentiation. With reference to the subject to be treated, the cells may be allogeneic and/or autologous. Among the methods include off-the-shelf methods. In some aspects, such as for off-the-shelf technologies, the cells are pluripotent and/or multipotent, such as stem cells, such as induced pluripotent stem cells (iPSCs). In some embodiments, the methods include isolating cells from the subject, preparing, processing, culturing, and/or engineering them, as described herein, and re-introducing them into the same patient, before or after cryopreservation.

[0355] Among the sub-types and subpopulations of T cells and/or of CD4+ and/or of CD8+ T cells are naive T (TN) cells, effector T cells (TEFF), memory T cells and sub-types thereof, such as stem cell memory T (TSCM), central memory T (TCM), effector memory T (TEM), or terminally differentiated effector memory T cells, tumor-infiltrating lymphocytes (TIL), immature T cells, mature T cells, helper T cells, cytotoxic T cells, mucosa-associated invariant T (MALT) cells, naturally occurring and adaptive regulatory T (Treg) cells, helper T cells, such as TH1 cells, TH2 cells, TH3 cells, TH17 cells, TH9 cells, TH22 cells, follicular helper T cells, alpha/beta T cells, and delta/gamma T cells.

[0356] In some embodiments, the cells are natural killer (NK) cells. In some embodiments, the cells are monocytes or granulocytes, e.g., myeloid cells, macrophages, neutrophils, dendritic cells, mast cells, eosinophils, and/or basophils.

[0357] The cells may be genetically modified to reduce expression or knock out endogenous TCRs. Such modifications are described in Mol Ther Nucleic Acids. 2012 Dec.; 1(12): e63; Blood. 2011 Aug. 11; 118(6):1495-503; Blood. 2012 Jun. 14; 119(24): 5697-5705; Torikai, Hiroki et al “HLA and TCR Knockout by Zinc Finger Nucleases: Toward “off-the-Shelf” Allogeneic T-Cell Therapy for CD19+ Malignancies.” Blood 116.21 (2010): 3766; Blood. 2018 Jan. 18; 131(3):311-322. doi: 10.1182/blood-2017-05-787598; and WO2016069283, which are incorporated by reference in their entirety.

[0358] The cells may be genetically modified to promote cytokine secretion. Such modifications are described in Hsu C, Hughes M S, Zheng Z, Bray R B, Rosenberg S A, Morgan R A. Primary human T lymphocytes engineered with a codon-optimized IL-15 gene resist cytokine withdrawal-induced apoptosis and persist long-term in the absence of exogenous cytokine. J Immunol. 2005; 175:7226-34; Quintarelli C, Vera J F, Savoldo B, Giordano Attianese G M, Pule M, Foster A E, Co-expression of cytokine and suicide genes to enhance the activity and safety of tumor-specific cytotoxic T lymphocytes. Blood. 2007; 110:2793-802; and Hsu C, Jones S A, Cohen C J, Zheng Z, Kerstann K, Zhou J, Cytokine-independent growth and clonal expansion of a primary human CD8+ T-cell clone following retroviral transduction with the IL-15 gene. Blood. 2007; 109:5168-77.

[0359] Mismatching of chemokine receptors on T cells and tumor-secreted chemokines has been shown to account for the suboptimal trafficking of T cells into the tumor microenvironment. To improve efficacy of therapy, the cells may be genetically modified to increase recognition of chemokines in tumor micro environment. Examples of such modifications are described in Moon, EKCarpenito, CSun, JWang, LCKapoor, VPredina, J Expression of a functional CCR2 receptor enhances tumor localization and tumor eradication by retargeted human T cells expressing a mesothelin-specific chimeric antibody receptor. Clin Cancer Res. 2011; 17: 4719-4730; and Craddock, JALu, ABear, APule, MBrenner, MKRooney, C M et al. Enhanced tumor trafficking of GD2 chimeric antigen receptor T cells by expression of the chemokine receptor CCR2b. J Immunother. 2010; 33: 780-788.

[0360] The cells may be genetically modified to enhance expression of costimulatory/enhancing receptors, such as CD28 and 41BB.

[0361] Adverse effects of T cell therapy can include cytokine release syndrome and prolonged B-cell depletion. Introduction of a suicide/safety switch in the recipient cells may improve the safety profile of a cell-based therapy. Accordingly, the cells may be genetically modified to include a suicide/safety switch. The suicide/safety switch may be a gene that confers sensitivity to an agent, e.g., a drug, upon the cell in which the gene is expressed, and which causes the cell to die when the cell is contacted with or exposed to the agent. Exemplary suicide/safety switches are described in Protein Cell. 2017 August; 8(8): 573-589. The suicide/safety switch may be HSV-TK. The suicide/safety switch may be cytosine daminase, purine nucleoside phosphorylase, or nitroreductase. The suicide/safety switch may be RapaCIDe™, described in U.S. Patent Application Pub. No. US20170166877A1. The suicide/safety switch system may be CD20/Rituximab, described in Haematologica. 2009 September; 94(9): 1316-1320. These references are incorporated by reference in their entirety.

[0362] The TCR or CAR may be introduced into the recipient cell as a split receptor which assembles only in the presence of a heterodimerizing small molecule. Such systems are described in Science. 2015 Oct. 16; 350(6258): aab4077, and in U.S. Pat. No. 9,587,020, which are hereby incorporated by reference.

[0363] In some embodiments, the cells include one or more nucleic acids, e.g., a polynucleotide encoding a TCR or CAR disclosed herein, wherein the polynucleotide is introduced via genetic engineering, and thereby express recombinant or genetically engineered TCRs or CARs as disclosed herein. In some embodiments, the nucleic acids are heterologous, i.e., normally not present in a cell or sample obtained from the cell, such as one obtained from another organism or cell, which for example, is not ordinarily found in the cell being engineered and/or an organism from which such cell is derived. In some embodiments, the nucleic acids are not naturally occurring, such as a nucleic acid not found in nature, including one comprising chimeric combinations of nucleic acids encoding various domains from multiple different cell types.

[0364] The nucleic acids may include a codon-optimized nucleotide sequence. Without being bound to a particular theory or mechanism, it is believed that codon optimization of the nucleotide sequence increases the translation efficiency of the mRNA transcripts. Codon optimization of the nucleotide sequence may involve substituting a native codon for another codon that encodes the same amino acid, but can be translated by tRNA that is more readily available within a cell, thus increasing translation efficiency. Optimization of the nucleotide sequence may also reduce secondary mRNA structures that would interfere with translation, thus increasing translation efficiency.

[0365] A construct or vector may be used to introduce the TCR or CAR into the recipient cell. Exemplary constructs are described herein. Polynucleotides encoding the alpha and beta chains of the TCR or CAR may in a single construct or in separate constructs. The polynucleotides encoding the alpha and beta chains may be operably linked to a promoter, e.g., a heterologous promoter. The heterologous promoter may be a strong promoter, e.g., EF1alpha, CMV, PGK1, Ubc, beta actin, CAG promoter, and the like. The heterologous promoter may be a weak promoter. The heterologous promoter may be an inducible promoter. Exemplary inducible promoters include, but are not limited to TRE, NFAT, GAL4, LAC, and the like. Other exemplary inducible expression systems are described in U.S. Pat. Nos. 5,514,578; 6,245,531; 7,091,038 and European Patent No. 0517805, which are incorporated by reference in their entirety.

[0366] The construct for introducing the TCR or CAR into the recipient cell may also comprise a polynucleotide encoding a signal peptide (signal peptide element). The signal peptide may promote surface trafficking of the introduced TCR or CAR. Exemplary signal peptides include, but are not limited to CD8 signal peptide, immunoglobulin signal peptides, where specific examples include GM-CSF and IgG kappa. Such signal peptides are described in Trends Biochem Sci. 2006 October; 31(10):563-71. Epub 2006 Aug. 21; and An, et al. “Construction of a New Anti-CD19 Chimeric Antigen Receptor and the Anti-Leukemia Function Study of the Transduced T Cells.” Oncotarget 7.9 (2016): 10638-10649. PMC. Web. 16 Aug. 2018; which are hereby incorporated by reference.

[0367] In some cases, e.g., cases where the alpha and beta chains are expressed from a single construct or open reading frame, or cases wherein a marker gene is included in the construct, the construct may comprise a ribosomal skip sequence. The ribosomal skip sequence may be a 2A peptide, e.g., a P2A or T2A peptide. Exemplary P2A and T2A peptides are described in Scientific Reports volume 7, Article number: 2193 (2017), hereby incorporated by reference in its entirety. In some cases, a FURIN/PACE cleavage site is introduced upstream of the 2A element. FURIN/PACE cleavage sites are described in, e.g., http://www.nuolan.net/substrates.html. The cleavage peptide may also be a factor Xa cleavage site. In cases where the alpha and beta chains are expressed from a single construct or open reading frame, the construct may comprise an internal ribosome entry site (IRES).

[0368] The construct may further comprise one or more marker genes. Exemplary marker genes include but are not limited to GFP, luciferase, HA, lacZ. The marker may be a selectable marker, such as an antibiotic resistance marker, a heavy metal resistance marker, or a biocide resistant marker, as is known to those of skill in the art. The marker may be a complementation marker for use in an auxotrophic host. Exemplary complementation markers and auxotrophic hosts are described in Gene. 2001 Jan. 24; 263(1-2):159-69. Such markers may be expressed via an IRES, a frameshift sequence, a 2A peptide linker, a fusion with the TCR or CAR, or expressed separately from a separate promoter.

[0369] Exemplary vectors or systems for introducing TCRs or CARs into recipient cells include, but are not limited to Adeno-associated virus, Adenovirus, Adenovirus+Modified vaccinia, Ankara virus (MVA), Adenovirus+Retrovirus, Adenovirus+Sendai virus, Adenovirus+Vaccinia virus, Alphavirus (VEE) Replicon Vaccine, Antisense oligonucleotide, Bifidobacterium longum, CRISPR-Cas9, E. coli, Flavivirus, Gene gun, Herpesviruses, Herpes simplex virus, Lactococcus lactis, Electroporation, Lentivirus, Lipofection, Listeria monocytogenes, Measles virus, Modified Vaccinia Ankara virus (MVA), mRNA Electroporation, Naked/Plasmid DNA, Naked/Plasmid DNA+Adenovirus, Naked/Plasmid DNA+Modified Vaccinia Ankara virus (MVA), Naked/Plasmid DNA+RNA transfer, Naked/Plasmid DNA+Vaccinia virus, Naked/Plasmid DNA+Vesicular stomatitis virus, Newcastle disease virus, Non-viral, PiggyBac™ (PB) Transposon, nanoparticle-based systems, Poliovirus, Poxvirus, Poxvirus+Vaccinia virus, Retrovirus, RNA transfer, RNA transfer+Naked/Plasmid DNA, RNA virus, Saccharomyces cerevisiae, Salmonella typhimurium, Semliki forest virus, Sendai virus, Shigella dysenteriae, Simian virus, siRNA, Sleeping Beauty transposon, Streptococcus mutans, Vaccinia virus, Venezuelan equine encephalitis virus replicon, Vesicular stomatitis virus, and Vibrio cholera.

[0370] In preferred embodiments, the TCR or CAR is introduced into the recipient cell via adeno associated virus (AAV), adenovirus, CRISPR-CAS9, herpesvirus, lentivirus, lipofection, mRNA electroporation, PiggyBac™ (PB) Transposon, retrovirus, RNA transfer, or Sleeping Beauty transposon.

[0371] In some embodiments, a vector for introducing a TCR or CAR into a recipient cell is a viral vector. Exemplary viral vectors include adenoviral vectors, adeno-associated viral (AAV) vectors, lentiviral vectors, herpes viral vectors, retroviral vectors, and the like. Such vectors are described herein.

[0372] Exemplary embodiments of TCR constructs for introducing a TCR or CAR into recipient cells is shown in FIG. 2. In some embodiments, a TCR construct includes, from the 5′-3′ direction, the following polynucleotide sequences: a promoter sequence, a signal peptide sequence, a TCR β variable (TCRPβv) sequence, a TCR β constant ((TCRβc) sequence, a cleavage peptide (e.g., P2A), a signal peptide sequence, a TCR α variable (TCRαv) sequence, and a TCR α constant (TCRαc) sequence. In some embodiments, the TCRβc and TCRαc sequences of the construct include one or more murine regions, e.g., full murine constant sequences or human [symbol] murine amino acid exchanges as described herein. In some embodiments, the construct further includes, 3′ of the TCRαc sequence, a cleavage peptide sequence (e.g., T2A) followed by a reporter gene. In an embodiment, the construct includes, from the 5′-3′ direction, the following polynucleotide sequences: a promoter sequence, a signal peptide sequence, a TCR β variable (TCRβv) sequence, a TCR β constant ((TCRβc) sequence containing one or more murine regions, a cleavage peptide (e.g., P2A), a signal peptide sequence, a TCR α variable (TCRαv) sequence, and a TCR α constant (TCRαc) sequence containing one or more murine regions, a cleavage peptide (e.g., T2A), and a reporter gene.

[0373] FIG. 3 depicts an exemplary construct backbone sequence for cloning TCRs into expression systems for therapy development.

[0374] FIG. 4 depicts an exemplary construct sequence for cloning an identified A*0201_LLASSILCA-specific TCR into expression systems for therapy development.

[0375] FIG. 5 depicts an exemplary construct sequence for cloning an identified A*0101_EVDPIGHLY-specific TCR into expression systems for therapy development.

[0376] Nucleotides, Vectors, Host Cells, and Related Methods

[0377] Also provided are isolated nucleic acids encoding HLA-PEPTIDE ABPs, vectors comprising the nucleic acids, and host cells comprising the vectors and nucleic acids, as well as recombinant techniques for the production of the ABPs.

[0378] The nucleic acids may be recombinant. The recombinant nucleic acids may be constructed outside living cells by joining natural or synthetic nucleic acid segments to nucleic acid molecules that can replicate in a living cell, or replication products thereof. For purposes herein, the replication can be in vitro replication or in vivo replication.

[0379] For recombinant production of an ABP, the nucleic acid(s) encoding it may be isolated and inserted into a replicable vector for further cloning (i.e., amplification of the DNA) or expression. In some aspects, the nucleic acid may be produced by homologous recombination, for example as described in U.S. Pat. No. 5,204,244, incorporated by reference in its entirety.

[0380] Many different vectors are known in the art. The vector components generally include one or more of the following: a signal sequence, an origin of replication, one or more marker genes, an enhancer element, a promoter, and a transcription termination sequence, for example as described in U.S. Pat. No. 5,534,615, incorporated by reference in its entirety.

[0381] Exemplary vectors or constructs suitable for expressing an ABP, e.g., a TCR, CAR, antibody, or antigen binding fragment thereof, include, e.g., the pUC series (Fermentas Life Sciences), the pBluescript series (Stratagene, LaJolla, Calif.), the pET series (Novagen, Madison, Wis.), the pGEX series (Pharmacia Biotech, Uppsala, Sweden), and the pEX series (Clontech, Palo Alto, Calif.). Bacteriophage vectors, such as AGT1O, AGTl 1, AZapII (Stratagene), AEMBL4, and ANMl 149, are also suitable for expressing an ABP disclosed herein.

[0382] Illustrative examples of suitable host cells are provided below. These host cells are not meant to be limiting, and any suitable host cell may be used to produce the ABPs provided herein.

[0383] Suitable host cells include any prokaryotic (e.g., bacterial), lower eukaryotic (e.g., yeast), or higher eukaryotic (e.g., mammalian) cells. Suitable prokaryotes include eubacteria, such as Gram-negative or Gram-positive organisms, for example, Enterobacteriaceae such as Escherichia (E. coli), Enterobacter, Erwinia, Klebsiella, Proteus, Salmonella (S. typhimurium), Serratia (S. marcescans), Shigella, Bacilli (B. subtilis and B. licheniformis), Pseudomonas (P aeruginosa), and Streptomyces. One useful E. coli cloning host is E. coli 294, although other strains such as E. coli B, E. coli X1776, and E. coli W3110 are also suitable.

[0384] In addition to prokaryotes, eukaryotic microbes such as filamentous fungi or yeast are also suitable cloning or expression hosts for HLA-PEPTIDE ABP-encoding vectors. Saccharomyces cerevisiae, or common baker's yeast, is a commonly used lower eukaryotic host microorganism. However, a number of other genera, species, and strains are available and useful, such as Schizosaccharomyces pombe, Kluyveromyces (K. lactis, K. fragilis, K. bulgaricus K. wickeramii, K. waltii, K. drosophilarum, K. thermotolerans, and K. marxianus), Yarrowia, Pichia pastoris, Candida (C. albicans), Trichoderma reesia, Neurospora crassa, Schwanniomyces (S. occidentalis), and filamentous fungi such as, for example Penicillium, Tolypocladium, and Aspergillus (A. nidulans and A. niger).

[0385] Useful mammalian host cells include COS-7 cells, HEK293 cells; baby hamster kidney (BHK) cells; Chinese hamster ovary (CHO); mouse sertoli cells; African green monkey kidney cells (VERO-76), and the like.

[0386] The host cells used to produce the HLA-PEPTIDE ABP may be cultured in a variety of media. Commercially available media such as, for example, Ham's F10, Minimal Essential Medium (MEM), RPMI-1640, and Dulbecco's Modified Eagle's Medium (DMEM) are suitable for culturing the host cells. In addition, any of the media described in Ham et al., Meth. Enz., 1979, 58:44; Barnes et al., Anal. Biochem., 1980, 102:255; and U.S. Pat. Nos. 4,767,704, 4,657,866, 4,927,762, 4,560,655, and 5,122,469; or WO 90/03430 and WO 87/00195 may be used. Each of the foregoing references is incorporated by reference in its entirety.

[0387] Any of these media may be supplemented as necessary with hormones and/or other growth factors (such as insulin, transferrin, or epidermal growth factor), salts (such as sodium chloride, calcium, magnesium, and phosphate), buffers (such as HEPES), nucleotides (such as adenosine and thymidine), antibiotics, trace elements (defined as inorganic compounds usually present at final concentrations in the micromolar range), and glucose or an equivalent energy source. Any other necessary supplements may also be included at appropriate concentrations that would be known to those skilled in the art.

[0388] The culture conditions, such as temperature, pH, and the like, are those previously used with the host cell selected for expression, and will be apparent to the ordinarily skilled artisan.

[0389] When using recombinant techniques, the ABP can be produced intracellularly, in the periplasmic space, or directly secreted into the medium. If the ABP is produced intracellularly, as a first step, the particulate debris, either host cells or lysed fragments, is removed, for example, by centrifugation or ultrafiltration. For example, Carter et al. (Bio/Technology, 1992, 10:163-167, incorporated by reference in its entirety) describes a procedure for isolating ABPs which are secreted to the periplasmic space of E. coli. Briefly, cell paste is thawed in the presence of sodium acetate (pH 3.5), EDTA, and phenylmethylsulfonylfluoride (PMSF) over about 30 min. Cell debris can be removed by centrifugation.

[0390] In some embodiments, the ABP is produced in a cell-free system. In some aspects, the cell-free system is an in vitro transcription and translation system as described in Yin et al., mAbs, 2012, 4:217-225, incorporated by reference in its entirety. In some aspects, the cell-free system utilizes a cell-free extract from a eukaryotic cell or from a prokaryotic cell. In some aspects, the prokaryotic cell is E. coli. Cell-free expression of the ABP may be useful, for example, where the ABP accumulates in a cell as an insoluble aggregate, or where yields from periplasmic expression are low.

[0391] Where the ABP is secreted into the medium, supernatants from such expression systems are generally first concentrated using a commercially available protein concentration filter, for example, an Amicon® or Millipore® Pellcon® ultrafiltration unit. A protease inhibitor such as PMSF may be included in any of the foregoing steps to inhibit proteolysis and antibiotics may be included to prevent the growth of adventitious contaminants.

[0392] The ABP composition prepared from the cells can be purified using, for example, hydroxylapatite chromatography, gel electrophoresis, dialysis, and affinity chromatography, with affinity chromatography being a particularly useful purification technique. The suitability of protein A as an affinity ligand depends on the species and isotype of any immunoglobulin Fc domain that is present in the ABP Protein A can be used to purify ABPs that comprise human γ1, γ2, or γ4 heavy chains (Lindmark et al., J. Immunol. Meth., 1983, 62:1-13, incorporated by reference in its entirety). Protein G is useful for all mouse isotypes and for human γ3 (Guss et al., EMBO J., 1986, 5:1567-1575, incorporated by reference in its entirety).

[0393] The matrix to which the affinity ligand is attached is most often agarose, but other matrices are available. Mechanically stable matrices such as controlled pore glass or poly(styrenedivinyl)benzene allow for faster flow rates and shorter processing times than can be achieved with agarose. Where the ABP comprises a C_{H3} domain, the BakerBond ABX® resin is useful for purification.

[0394] Other techniques for protein purification, such as fractionation on an ion-exchange column, ethanol precipitation, Reverse Phase HPLC, chromatography on silica, chromatography on heparin Sepharose®, chromatofocusing, SDS-PAGE, and ammonium sulfate precipitation are also available, and can be applied by one of skill in the art.

[0395] Following any preliminary purification step(s), the mixture comprising the ABP of interest and contaminants may be subjected to low pH hydrophobic interaction chromatography using an elution buffer at a pH between about 2.5 to about 4.5, generally performed at low salt concentrations (e.g., from about 0 to about 0.25 M salt).

[0396] Methods of Making HLA-PEPTIDE ABPs

[0397] HLA-PEPTIDE Antigen Preparation

[0398] The HLA-PEPTIDE antigen used for isolation or creation of the ABPs provided herein may be intact HLA-PEPTIDE or a fragment of HLA-PEPTIDE. The HLA-PEPTIDE antigen may be, for example, in the form of isolated protein or a protein expressed on the surface of a cell.

[0399] In some embodiments, the HLA-PEPTIDE antigen is a non-naturally occurring variant of HLA-PEPTIDE, such as a HLA-PEPTIDE protein having an amino acid sequence or post-translational modification that does not occur in nature.

[0400] In some embodiments, the HLA-PEPTIDE antigen is truncated by removal of, for example, intracellular or membrane-spanning sequences, or signal sequences. In some embodiments, the HLA-PEPTIDE antigen is fused at its C-terminus to a human IgG1 Fc domain or a polyhistidine tag.

### Methods of Identifying ABPs

[0401] ABPs that bind HLA-PEPTIDE can be identified using any method known in the art, e.g., phage display or immunization of a subject.

[0402] One method of identifying an antigen binding protein includes providing at least one HLA-PEPTIDE target; and binding the at least one target with an antigen binding protein, thereby identifying the antigen binding protein. The antigen binding protein can be present in a library comprising a plurality of distinct antigen binding proteins.

[0403] In some embodiments, the library is a phage display library. The phage display library can be developed so that it is substantially free of antigen binding proteins that non-specifically bind the HLA of the HLA-PEPTIDE target. The antigen binding protein can be present in a yeast display library comprising a plurality of distinct antigen binding proteins. The yeast display library can be developed so that it is substantially free of antigen binding proteins that non-specifically bind the HLA of the HLA-PEPTIDE target.

[0404] In some embodiments, the library is a yeast display library.

[0405] In some embodiments, the library is a TCR display library. Exemplary TCR display libraries and methods of using such TCR display libraries are described in WO 98/39482; WO 01/62908; WO 2004/044004; WO2005116646, WO201401668863 WO2015136072, WO2017046198; and Helmut et al, (2000) PNAS 97 (26) 14578-14583, which are hereby incorporated by reference in their entirety.

[0406] In some aspects, the binding step is performed more than once, optionally at least three times, e.g., at least 1, 2, 3, 4, 5, 6, 7, 8, 9, or 10×.

[0407] In addition, the method can also include contacting the antigen binding protein with one or more peptide-HLA complexes that are distinct from the HLA-PEPTIDE target to determine if the antigen binding protein selectively binds the HLA-PEPTIDE target.

[0408] Another method of identifying an antigen binding protein can include obtaining at least one HLA-PEPTIDE target; administering the HLA-PEPTIDE target to a subject (e.g., a mouse, rabbit or a llama), optionally in combination with an adjuvant; and isolating the antigen binding protein from the subject. Isolating the antigen binding protein can include screening the serum of the subject to identify the antigen binding protein. The method can also include contacting the antigen binding protein with one or more peptide-HLA complexes that are distinct from the HLA-PEPTIDE target, e.g., to determine if the antigen binding protein selectively binds to the HLA-PEPTIDE target. An antigen binding protein that is identified can be humanized.

[0409] In some aspects, isolating the antigen binding protein comprises isolating a B cell from the subject that expresses the antigen binding protein. The B cell can be used to create a hybridoma. The B cell can also be used for cloning one or more of its CDRs. The B cell can also be immortalized, for example, by using EBV transformation. Sequences encoding an antigen binding protein can be cloned from immortalized B cells or can be cloned directly from B cells isolated from an immunized subject. A library that comprises the antigen binding protein of the B cell can also be created, optionally wherein the library is phage display or yeast display.

[0410] Another method of identifying an antigen binding protein can include obtaining a cell comprising the antigen binding protein; contacting the cell with an HLA-multimer (e.g., a tetramer) comprising at least one HLA-PEPTIDE target; and identifying the antigen binding protein via binding between the HLA-multimer and the antigen binding protein.

[0411] The cell can be, e.g., a T cell, optionally a CTL, or an NK cell, for example. The method can further include isolating the cell, optionally using flow cytometry, magnetic separation, or single cell separation. The method can further include sequencing the antigen binding protein.

[0412] Another method of identifying an antigen binding protein can include obtaining one or more cells comprising the antigen binding protein; activating the one or more cells with at least one HLA-PEPTIDE target presented on at least one antigen presenting cell (APC); and identifying the antigen binding protein via selection of one or more cells activated by interaction with at least one HLA-PEPTIDE target.

[0413] The cell can be, e.g., a T cell, optionally a CTL, or an NK cell, for example. The method can further include isolating the cell, optionally using flow cytometry, magnetic separation, or single cell separation. The method can further include sequencing the antigen binding protein.

### Methods of Making Monoclonal ABPs

[0414] Monoclonal ABPs may be obtained, for example, using the hybridoma method first described by Kohler et al., Nature, 1975, 256:495-497 (incorporated by reference in its entirety), and/or by recombinant DNA methods (see e.g., U.S. Pat. No. 4,816,567, incorporated by reference in its entirety). Monoclonal ABPs may also be obtained, for example, using phage or yeast-based libraries. See e.g., U.S. Pat. Nos. 8,258,082 and 8,691,730, each of which is incorporated by reference in its entirety.

[0415] In the hybridoma method, a mouse or other appropriate host animal is immunized to elicit lymphocytes that produce or are capable of producing ABPs that will specifically bind to the protein used for immunization. Alternatively, lymphocytes may be immunized in vitro. Lymphocytes are then fused with myeloma cells using a suitable fusing agent, such as polyethylene glycol, to form a hybridoma cell. See Goding J. W., Monoclonal ABPs: Principles and Practice 3^{rd} ed. (1986) Academic Press, San Diego, Calif., incorporated by reference in its entirety.

[0416] The hybridoma cells are seeded and grown in a suitable culture medium that contains one or more substances that inhibit the growth or survival of the unfused, parental myeloma cells. For example, if the parental myeloma cells lack the enzyme hypoxanthine guanine phosphoribosyl transferase (HGPRT or HPRT), the culture medium for the hybridomas typically will include hypoxanthine, aminopterin, and thymidine (HAT medium), which substances prevent the growth of HGPRT-deficient cells.

[0417] Useful myeloma cells are those that fuse efficiently, support stable high-level production of ABP by the selected ABP-producing cells, and are sensitive media conditions, such as the presence or absence of HAT medium. Among these, preferred myeloma cell lines are murine myeloma lines, such as those derived from MOP-21 and MC-11 mouse tumors (available from the Salk Institute Cell Distribution Center, San Diego, Calif.), and SP-2 or X63-Ag8-653 cells (available from the American Type Culture Collection, Rockville, Md.). Human myeloma and mouse-human heteromyeloma cell lines also have been described for the production of human monoclonal ABPs. See e.g., Kozbor, J. Immunol., 1984, 133:3001, incorporated by reference in its entirety.

[0418] After the identification of hybridoma cells that produce ABPs of the desired specificity, affinity, and/or biological activity, selected clones may be subcloned by limiting dilution procedures and grown by standard methods. See Goding, supra. Suitable culture media for this purpose include, for example, D-MEM or RPMI-1640 medium. In addition, the hybridoma cells may be grown in vivo as ascites tumors in an animal.

[0419] DNA encoding the monoclonal ABPs may be readily isolated and sequenced using conventional procedures (e.g., by using oligonucleotide probes that are capable of binding specifically to genes encoding the heavy and light chains of the monoclonal ABPs). Thus, the hybridoma cells can serve as a useful source of DNA encoding ABPs with the desired properties. Once isolated, the DNA may be placed into expression vectors, which are then transfected into host cells such as bacteria (e.g., E. coli), yeast (e.g., Saccharomyces or Pichia sp.), COS cells, Chinese hamster ovary (CHO) cells, or myeloma cells that do not otherwise produce ABP, to produce the monoclonal ABPs.

### Methods of Making Chimeric ABPs

[0420] Illustrative methods of making chimeric ABPs are described, for example, in U.S. Pat. No. 4,816,567; and Morrison et al., Proc. Natl. Acad. Sci. USA, 1984, 81:6851-6855; each of which is incorporated by reference in its entirety. In some embodiments, a chimeric ABP is made by using recombinant techniques to combine a non-human variable region (e.g., a variable region derived from a mouse, rat, hamster, rabbit, or non-human primate, such as a monkey) with a human constant region.

### Methods of Making Humanized ABPs

[0421] Humanized ABPs may be generated by replacing most, or all, of the structural portions of a non-human monoclonal ABP with corresponding human ABP sequences. Consequently, a hybrid molecule is generated in which only the antigen-specific variable, or CDR, is composed of non-human sequence. Methods to obtain humanized ABPs include those described in, for example, Winter and Milstein, Nature, 1991, 349:293-299; Rader et al., Proc. Nat. Acad. Sci. U.S.A., 1998, 95:8910-8915; Steinberger et al., J. Biol. Chem., 2000, 275:36073-36078; Queen et al., Proc. Natl. Acad. Sci. U.S.A., 1989, 86:10029-10033; and U.S. Pat. Nos. 5,585,089, 5,693,761, 5,693,762, and 6,180,370; each of which is incorporated by reference in its entirety.

### Methods of Making Human ABPs

[0422] Human ABPs can be generated by a variety of techniques known in the art, for example by using transgenic animals (e.g., humanized mice). See, e.g., Jakobovits et al., Proc. Natl. Acad. Sci. U.S.A., 1993, 90:2551; Jakobovits et al., Nature, 1993, 362:255-258; Bruggermann et al., Year in Immuno., 1993, 7:33; and U.S. Pat. Nos. 5,591,669, 5,589,369 and 5,545,807; each of which is incorporated by reference in its entirety. Human ABPs can also be derived from phage-display libraries (see e.g., Hoogenboom et al., J. Mol. Biol., 1991, 227:381-388; Marks et al., J. Mol. Biol., 1991, 222:581-597; and U.S. Pat. Nos. 5,565,332 and 5,573,905; each of which is incorporated by reference in its entirety). Human ABPs may also be generated by in vitro activated B cells (see e.g., U.S. Pat. Nos. 5,567,610 and 5,229,275, each of which is incorporated by reference in its entirety). Human ABPs may also be derived from yeast-based libraries (see e.g., U.S. Pat. No. 8,691,730, incorporated by reference in its entirety).

### Methods of Making ABP Fragments

[0423] The ABP fragments provided herein may be made by any suitable method, including the illustrative methods described herein or those known in the art. Suitable methods include recombinant techniques and proteolytic digestion of whole ABPs. Illustrative methods of making ABP fragments are described, for example, in Hudson et al., Nat. Med., 2003, 9:129-134, incorporated by reference in its entirety. Methods of making scFv ABPs are described, for example, in Pluckthun, in The Pharmacology of Monoclonal ABPs, vol. 113, Rosenburg and Moore eds., Springer-Verlag, New York, pp. 269-315 (1994); WO 93/16185; and U.S. Pat. Nos. 5,571,894 and 5,587,458; each of which is incorporated by reference in its entirety.

### Methods of Making Alternative Scaffolds

[0424] The alternative scaffolds provided herein may be made by any suitable method, including the illustrative methods described herein or those known in the art. For example, methods of preparing Adnectins™ are described in Emanuel et al., mAbs, 2011, 3:38-48, incorporated by reference in its entirety. Methods of preparing iMabs are described in U.S. Pat. Pub. No. 2003/0215914, incorporated by reference in its entirety. Methods of preparing Anticalins® are described in Vogt and Skerra, Chem. Biochem., 2004, 5:191-199, incorporated by reference in its entirety. Methods of preparing Kunitz domains are described in Wagner et al., Biochem. & Biophys. Res. Comm., 1992, 186:118-1145, incorporated by reference in its entirety. Methods of preparing thioredoxin peptide aptamers are provided in Geyer and Brent, Meth. Enzymol., 2000, 328:171-208, incorporated by reference in its entirety. Methods of preparing Affibodies are provided in Fernandez, Curr. Opinion in Biotech., 2004, 15:364-373, incorporated by reference in its entirety. Methods of preparing DARPins are provided in Zahnd et al., J. Mol. Biol., 2007, 369:1015-1028, incorporated by reference in its entirety. Methods of preparing Affilins are provided in Ebersbach et al., J. Mol. Biol., 2007, 372:172-185, incorporated by reference in its entirety. Methods of preparing Tetranectins are provided in Graversen et al., J. Biol. Chem., 2000, 275:37390-37396, incorporated by reference in its entirety. Methods of preparing Avimers are provided in Silverman et al., Nature Biotech., 2005, 23:1556-1561, incorporated by reference in its entirety. Methods of preparing Fynomers are provided in Silacci et al., J. Biol. Chem., 2014, 289:14392-14398, incorporated by reference in its entirety. Further information on alternative scaffolds is provided in Binz et al., Nat. Biotechnol., 2005 23:1257-1268; and Skerra, Current Opin. in Biotech., 2007 18:295-304, each of which is incorporated by reference in its entirety.

### Methods of Making Multispecific ABPs

[0425] The multispecific ABPs provided herein may be made by any suitable method, including the illustrative methods described herein or those known in the art. Methods of making common light chain ABPs are described in Merchant et al., Nature Biotechnol., 1998, 16:677-681, incorporated by reference in its entirety. Methods of making tetravalent bispecific ABPs are described in Coloma and Morrison, Nature Biotechnol., 1997, 15:159-163, incorporated by reference in its entirety. Methods of making hybrid immunoglobulins are described in Milstein and Cuello, Nature, 1983, 305:537-540; and Staerz and Bevan, Proc. Natl. Acad. Sci. USA, 1986, 83:1453-1457; each of which is incorporated by reference in its entirety. Methods of making immunoglobulins with knobs-into-holes modification are described in U.S. Pat. No. 5,731,168, incorporated by reference in its entirety. Methods of making immunoglobulins with electrostatic modifications are provided in WO 2009/089004, incorporated by reference in its entirety. Methods of making bispecific single chain ABPs are described in Traunecker et al., EMBO J., 1991, 10:3655-3659; and Gruber et al., J. Immunol., 1994, 152:5368-5374; each of which is incorporated by reference in its entirety. Methods of making single-chain ABPs, whose linker length may be varied, are described in U.S. Pat. Nos. 4,946,778 and 5,132,405, each of which is incorporated by reference in its entirety. Methods of making diabodies are described in Hollinger et al., Proc. Natl. Acad. Sci. USA, 1993, 90:6444-6448, incorporated by reference in its entirety. Methods of making triabodies and tetrabodies are described in Todorovska et al., J. Immunol. Methods, 2001, 248:47-66, incorporated by reference in its entirety. Methods of making trispecific F(ab′)3 derivatives are described in Tutt et al. J. Immunol., 1991, 147:60-69, incorporated by reference in its entirety. Methods of making cross-linked ABPs are described in U.S. Pat. No. 4,676,980; Brennan et al., Science, 1985, 229:81-83; Staerz, et al. Nature, 1985, 314:628-631; and EP 0453082; each of which is incorporated by reference in its entirety. Methods of making antigen-binding domains assembled by leucine zippers are described in Kostelny et al., J. Immunol., 1992, 148:1547-1553, incorporated by reference in its entirety. Methods of making ABPs via the DNL approach are described in U.S. Pat. Nos. 7,521,056; 7,550,143; 7,534,866; and 7,527,787; each of which is incorporated by reference in its entirety. Methods of making hybrids of ABP and non-ABP molecules are described in WO 93/08829, incorporated by reference in its entirety, for examples of such ABPs. Methods of making DAF ABPs are described in U.S. Pat. Pub. No. 2008/0069820, incorporated by reference in its entirety. Methods of making ABPs via reduction and oxidation are described in Carlring et al., PLoS One, 2011, 6:e22533, incorporated by reference in its entirety. Methods of making DVD-Igs™ are described in U.S. Pat. No. 7,612,181, incorporated by reference in its entirety. Methods of making DARTs™ are described in Moore et al., Blood, 2011, 117:454-451, incorporated by reference in its entirety. Methods of making DuoBodies® are described in Labrijn et al., Proc. Natl. Acad. Sci. USA, 2013, 110:5145-5150; Gramer et al., mAbs, 2013, 5:962-972; and Labrijn et al., Nature Protocols, 2014, 9:2450-2463; each of which is incorporated by reference in its entirety. Methods of making ABPs comprising scFvs fused to the C-terminus of the C_{H3} from an IgG are described in Coloma and Morrison, Nature Biotechnol., 1997, 15:159-163, incorporated by reference in its entirety. Methods of making ABPs in which a Fab molecule is attached to the constant region of an immunoglobulin are described in Miler et al., J. Immunol., 2003, 170:4854-4861, incorporated by reference in its entirety. Methods of making CovX-Bodies are described in Doppalapudi et al., Proc. Natl. Acad. Sci. USA, 2010, 107:22611-22616, incorporated by reference in its entirety. Methods of making Fcab ABPs are described in Wozniak-Knopp et al., Protein Eng. Des. Sel., 2010, 23:289-297, incorporated by reference in its entirety. Methods of making TandAb® ABPs are described in Kipriyanov et al., J. Mol. Biol., 1999, 293:41-56 and Zhukovsky et al., Blood, 2013, 122:5116, each of which is incorporated by reference in its entirety. Methods of making tandem Fabs are described in WO 2015/103072, incorporated by reference in its entirety. Methods of making Zybodies™ are described in LaFleur et al., mAbs, 2013, 5:208-218, incorporated by reference in its entirety.

### Methods of Making Variants

[0426] Any suitable method can be used to introduce variability into a polynucleotide sequence(s) encoding an ABP, including error-prone PCR, chain shuffling, and oligonucleotide-directed mutagenesis such as trinucleotide-directed mutagenesis (TRIM). In some aspects, several CDR residues (e.g., 4-6 residues at a time) are randomized. CDR residues involved in antigen binding may be specifically identified, for example, using alanine scanning mutagenesis or modeling. CDR-H3 and CDR-L3 in particular are often targeted for mutation.

[0427] The introduction of diversity into the variable regions and/or CDRs can be used to produce a secondary library. The secondary library is then screened to identify ABP variants with improved affinity. Affinity maturation by constructing and reselecting from secondary libraries has been described, for example, in Hoogenboom et al., Methods in Molecular Biology, 2001, 178:1-37, incorporated by reference in its entirety.

[0428] Methods for Engineering Cells with ABPs

[0429] Also provided are methods, nucleic acids, compositions, and kits, for expressing the ABPs, including receptors comprising antibodies, CARs, and TCRs, and for producing genetically engineered cells expressing such ABPs. The genetic engineering generally involves introduction of a nucleic acid encoding the recombinant or engineered component into the cell, such as by retroviral transduction, transfection, or transformation.

[0430] In some embodiments, gene transfer is accomplished by first stimulating the cell, such as by combining it with a stimulus that induces a response such as proliferation, survival, and/or activation, e.g., as measured by expression of a cytokine or activation marker, followed by transduction of the activated cells, and expansion in culture to numbers sufficient for clinical applications.

[0431] In some contexts, overexpression of a stimulatory factor (for example, a lymphokine or a cytokine) may be toxic to a subject. Thus, in some contexts, the engineered cells include gene segments that cause the cells to be susceptible to negative selection in vivo, such as upon administration in adoptive immunotherapy. For example in some aspects, the cells are engineered so that they can be eliminated as a result of a change in the in vivo condition of the patient to which they are administered. The negative selectable phenotype may result from the insertion of a gene that confers sensitivity to an administered agent, for example, a compound. Negative selectable genes include the Herpes simplex virus type I thymidine kinase (HSV-I TK) gene (Wigler et al., Cell II: 223, 1977) which confers ganciclovir sensitivity; the cellular hypoxanthine phosphribosyltransferase (HPRT) gene, the cellular adenine phosphoribosyltransferase (APRT) gene, bacterial cytosine deaminase, (Mullen et al., Proc. Natl. Acad. Sci. USA. 89:33 (1992)).

[0432] In some aspects, the cells further are engineered to promote expression of cytokines or other factors. Various methods for the introduction of genetically engineered components, e.g., antigen receptors, e.g., CARs, are well known and may be used with the provided methods and compositions. Exemplary methods include those for transfer of nucleic acids encoding the receptors, including via viral, e.g., retroviral or lentiviral, transduction, transposons, and electroporation.

[0433] In some embodiments, recombinant nucleic acids are transferred into cells using recombinant infectious virus particles, such as, e.g., vectors derived from simian virus 40 (SV40), adenoviruses, adeno-associated virus (AAV). In some embodiments, recombinant nucleic acids are transferred into T cells using recombinant lentiviral vectors or retroviral vectors, such as gamma-retroviral vectors (see, e.g., Koste et al. (2014) Gene Therapy 2014 Apr. 3. doi: 10.1038/gt.2014.25; Carlens et al. (2000) Exp Hematol 28(10): 1137-46; Alonso-Camino et al. (2013) Mol Ther Nucl Acids 2, e93; Park et al., Trends Biotechnol. 2011 Nov. 29(11): 550-557.

[0434] In some embodiments, the retroviral vector has a long terminal repeat sequence (LTR), e.g., a retroviral vector derived from the Moloney murine leukemia virus (MoMLV), myeloproliferative sarcoma virus (MPSV), murine embryonic stem cell virus (MESV), murine stem cell virus (MSCV), spleen focus forming virus (SFFV), or adeno-associated virus (AAV). Most retroviral vectors are derived from murine retroviruses. In some embodiments, the retroviruses include those derived from any avian or mammalian cell source. The retroviruses typically are amphotropic, meaning that they are capable of infecting host cells of several species, including humans. In one embodiment, the gene to be expressed replaces the retroviral gag, pol and/or env sequences. A number of illustrative retroviral systems have been described (e.g., U.S. Pat. Nos. 5,219,740; 6,207,453; 5,219,740; Miller and Rosman (1989) BioTechniques 7:980-990; Miller, A. D. (1990) Human Gene Therapy 1:5-14; Scarpa et al. (1991) Virology 180:849-852; Burns et al. (1993) Proc. Natl. Acad. Sci. USA 90:8033-8037; and Boris-Lawrie and Temin (1993) Cur. Opin. Genet. Develop. 3:102-109.

[0435] Methods of lentiviral transduction are known. Exemplary methods are described in, e.g., Wang et al. (2012) J. Immunother. 35(9): 689-701; Cooper et al. (2003) Blood. 101:1637-1644; Verhoeyen et al. (2009) Methods Mol Biol. 506: 97-114; and Cavalieri et al. (2003) Blood. 102(2): 497-505.

[0436] In some embodiments, recombinant nucleic acids are transferred into T cells via electroporation (see, e.g., Chicaybam et al, (2013) PLoS ONE 8(3): e60298; Van Tedeloo et al. (2000) Gene Therapy 7(16): 1431-1437; and Roth et al. (2018) Nature 559:405-409). In some embodiments, recombinant nucleic acids are transferred into T cells via transposition (see, e.g., Manuri et al. (2010) Hum Gene Ther 21(4): 427-437; Sharma et al. (2013) Molec Ther Nucl Acids 2, e74; and Huang et al. (2009) Methods Mol Biol 506: 115-126). Other methods of introducing and expressing genetic material in immune cells include calcium phosphate transfection (e.g., as described in Current Protocols in Molecular Biology, John Wiley & Sons, New York. N.Y.), protoplast fusion, cationic liposome-mediated transfection; tungsten particle-facilitated microparticle bombardment (Johnston, Nature, 346: 776-777 (1990)); and strontium phosphate DNA co-precipitation (Brash et al., Mol. Cell Biol., 7: 2031-2034 (1987)).

[0437] Other approaches and vectors for transfer of the nucleic acids encoding the recombinant products are those described, e.g., in international patent application, Publication No.: WO2014055668, and U.S. Pat. No. 7,446,190.

[0438] Among additional nucleic acids, e.g., genes for introduction are those to improve the efficacy of therapy, such as by promoting viability and/or function of transferred cells; genes to provide a genetic marker for selection and/or evaluation of the cells, such as to assess in vivo survival or localization; genes to improve safety, for example, by making the cell susceptible to negative selection in vivo as described by Lupton S. D. et al., Mol. and Cell Biol., 11:6 (1991); and Riddell et al., Human Gene Therapy 3:319-338 (1992); see also the publications of PCT/US91/08442 and PCT/US94/05601 by Lupton et al. describing the use of bifunctional selectable fusion genes derived from fusing a dominant positive selectable marker with a negative selectable marker. See, e.g., Riddell et al., U.S. Pat. No. 6,040,177, at columns 14-17.

[0439] Preparation of Engineered Cells

[0440] In some embodiments, preparation of the engineered cells includes one or more culture and/or preparation steps. The cells for introduction of the HLA-PEPTIDE-ABP, e.g., TCR or CAR, can be isolated from a sample, such as a biological sample, e.g., one obtained from or derived from a subject. In some embodiments, the subject from which the cell is isolated is one having the disease or condition or in need of a cell therapy or to which cell therapy will be administered. The subject in some embodiments is a human in need of a particular therapeutic intervention, such as the adoptive cell therapy for which cells are being isolated, processed, and/or engineered.

[0441] Accordingly, the cells in some embodiments are primary cells, e.g., primary human cells. The samples include tissue, fluid, and other samples taken directly from the subject, as well as samples resulting from one or more processing steps, such as separation, centrifugation, genetic engineering (e.g. transduction with viral vector), washing, and/or incubation. The biological sample can be a sample obtained directly from a biological source or a sample that is processed. Biological samples include, but are not limited to, body fluids, such as blood, plasma, serum, cerebrospinal fluid, synovial fluid, urine and sweat, tissue and organ samples, including processed samples derived therefrom.

[0442] In some aspects, the sample from which the cells are derived or isolated is blood or a blood-derived sample, or is or is derived from an apheresis or leukapheresis product. Exemplary samples include whole blood, peripheral blood mononuclear cells (PBMCs), leukocytes, bone marrow, thymus, tissue biopsy, tumor, leukemia, lymphoma, lymph node, gut associated lymphoid tissue, mucosa associated lymphoid tissue, spleen, other lymphoid tissues, liver, lung, stomach, intestine, colon, kidney, pancreas, breast, bone, prostate, cervix, testes, ovaries, tonsil, or other organ, and/or cells derived therefrom. Samples include, in the context of cell therapy, e.g., adoptive cell therapy, samples from autologous and allogeneic sources.

[0443] In some embodiments, the cells are derived from cell lines, e.g., T cell lines. The cells in some embodiments are obtained from a xenogeneic source, for example, from mouse, rat, non-human primate, or pig.

[0444] In some embodiments, isolation of the cells includes one or more preparation and/or non-affinity based cell separation steps. In some examples, cells are washed, centrifuged, and/or incubated in the presence of one or more reagents, for example, to remove unwanted components, enrich for desired components, lyse or remove cells sensitive to particular reagents. In some examples, cells are separated based on one or more property, such as density, adherent properties, size, sensitivity and/or resistance to particular components.

[0445] In some examples, cells from the circulating blood of a subject are obtained, e.g., by apheresis or leukapheresis. The samples, in some aspects, contain lymphocytes, including T cells, monocytes, granulocytes, B cells, other nucleated white blood cells, red blood cells, and/or platelets, and in some aspects contains cells other than red blood cells and platelets.

[0446] In some embodiments, the blood cells collected from the subject are washed, e.g., to remove the plasma fraction and to place the cells in an appropriate buffer or media for subsequent processing steps. In some embodiments, the cells are washed with phosphate buffered saline (PBS). In some embodiments, the wash solution lacks calcium and/or magnesium and/or many or all divalent cations. In some aspects, a washing step is accomplished a semi-automated “flow-through” centrifuge (for example, the Cobe 2991 cell processor, Baxter) according to the manufacturer's instructions. In some aspects, a washing step is accomplished by tangential flow filtration (TFF) according to the manufacturer's instructions. In some embodiments, the cells are resuspended in a variety of biocompatible buffers after washing, such as, for example, Ca++/Mg++ free PBS. In certain embodiments, components of a blood cell sample are removed and the cells directly resuspended in culture media.

[0447] In some embodiments, the methods include density-based cell separation methods, such as the preparation of white blood cells from peripheral blood by lysing the red blood cells and centrifugation through a Percoll or Ficoll gradient.

[0448] In some embodiments, the isolation methods include the separation of different cell types based on the expression or presence in the cell of one or more specific molecules, such as surface markers, e.g., surface proteins, intracellular markers, or nucleic acid. In some embodiments, any known method for separation based on such markers may be used. In some embodiments, the separation is affinity- or immunoaffinity-based separation. For example, the isolation in some aspects includes separation of cells and cell populations based on the cells' expression or expression level of one or more markers, typically cell surface markers, for example, by incubation with an antibody or binding partner that specifically binds to such markers, followed generally by washing steps and separation of cells having bound the antibody or binding partner, from those cells having not bound to the antibody or binding partner.

[0449] Such separation steps can be based on positive selection, in which the cells having bound the reagents are retained for further use, and/or negative selection, in which the cells having not bound to the antibody or binding partner are retained. In some examples, both fractions are retained for further use. In some aspects, negative selection can be particularly useful where no antibody is available that specifically identifies a cell type in a heterogeneous population, such that separation is best carried out based on markers expressed by cells other than the desired population.

[0450] The separation need not result in 100% enrichment or removal of a particular cell population or cells expressing a particular marker. For example, positive selection of or enrichment for cells of a particular type, such as those expressing a marker, refers to increasing the number or percentage of such cells, but need not result in a complete absence of cells not expressing the marker. Likewise, negative selection, removal, or depletion of cells of a particular type, such as those expressing a marker, refers to decreasing the number or percentage of such cells, but need not result in a complete removal of all such cells.

[0451] In some examples, multiple rounds of separation steps are carried out, where the positively or negatively selected fraction from one step is subjected to another separation step, such as a subsequent positive or negative selection. In some examples, a single separation step can deplete cells expressing multiple markers simultaneously, such as by incubating cells with a plurality of antibodies or binding partners, each specific for a marker targeted for negative selection. Likewise, multiple cell types can simultaneously be positively selected by incubating cells with a plurality of antibodies or binding partners expressed on the various cell types.

[0452] For example, in some aspects, specific subpopulations of T cells, such as cells positive or expressing high levels of one or more surface markers, e.g., CD28+, CD62L+, CCR7+, CD27+, CD127+, CD4+, CD8+, CD45RA+, and/or CD45RO+ T cells, are isolated by positive or negative selection techniques.

[0453] For example, CD3+, CD28+ T cells can be positively selected using CD3/CD28 conjugated magnetic beads (e.g., DYNABEADS® M-450 CD3/CD28 T Cell Expander).

[0454] In some embodiments, isolation is carried out by enrichment for a particular cell population by positive selection, or depletion of a particular cell population, by negative selection. In some embodiments, positive or negative selection is accomplished by incubating cells with one or more antibodies or other binding agent that specifically bind to one or more surface markers expressed or expressed (marker+) at a relatively higher level (marker^{high}) on the positively or negatively selected cells, respectively.

[0455] In some embodiments, T cells are separated from a PBMC sample by negative selection of markers expressed on non-T cells, such as B cells, monocytes, or other white blood cells, such as CD14. In some aspects, a CD4+ or CD8+ selection step is used to separate CD4+ helper and CD8+ cytotoxic T cells. Such CD4+ and CD8+ populations can be further sorted into sub-populations by positive or negative selection for markers expressed or expressed to a relatively higher degree on one or more naive, memory, and/or effector T cell subpopulations.

[0456] In some embodiments, CD8+ cells are further enriched for or depleted of naive, central memory, effector memory, and/or central memory stem cells, such as by positive or negative selection based on surface antigens associated with the respective subpopulation. In some embodiments, enrichment for central memory T (TCM) cells is carried out to increase efficacy, such as to improve long-term survival, expansion, and/or engraftment following administration, which in some aspects is particularly robust in such sub-populations. See Terakura et al. (2012) Blood. 1:72-82; Wang et al. (2012) J Immunother. 35(9):689-701. In some embodiments, combining TCM-enriched CD8+ T cells and CD4+ T cells further enhances efficacy.

[0457] In embodiments, memory T cells are present in both CD62L+ and CD62L-subsets of CD8+ peripheral blood lymphocytes. PBMC can be enriched for or depleted of CD62L-CD8+ and/or CD62L+CD8+ fractions, such as using anti-CD8 and anti-CD62L antibodies.

[0458] In some embodiments, the enrichment for central memory T (TCM) cells is based on positive or high surface expression of CD45RO, CD62L, CCR7, CD28, CD3, and/or CD 127; in some aspects, it is based on negative selection for cells expressing or highly expressing CD45RA and/or granzyme B. In some aspects, isolation of a CD8+ population enriched for TCM cells is carried out by depletion of cells expressing CD4, CD14, CD45RA, and positive selection or enrichment for cells expressing CD62L. In one aspect, enrichment for central memory T (TCM) cells is carried out starting with a negative fraction of cells selected based on CD4 expression, which is subjected to a negative selection based on expression of CD14 and CD45RA, and a positive selection based on CD62L. Such selections in some aspects are carried out simultaneously and in other aspects are carried out sequentially, in either order. In some aspects, the same CD4 expression-based selection step used in preparing the CD8+ cell population or subpopulation, also is used to generate the CD4+ cell population or sub-population, such that both the positive and negative fractions from the CD4-based separation are retained and used in subsequent steps of the methods, optionally following one or more further positive or negative selection steps.

[0459] In a particular example, a sample of PBMCs or other white blood cell sample is subjected to selection of CD4+ cells, where both the negative and positive fractions are retained. The negative fraction then is subjected to negative selection based on expression of CD14 and CD45RA or ROR1, and positive selection based on a marker characteristic of central memory T cells, such as CD62L or CCR7, where the positive and negative selections are carried out in either order.

[0460] CD4+T helper cells are sorted into naive, central memory, and effector cells by identifying cell populations that have cell surface antigens. CD4+ lymphocytes can be obtained by standard methods. In some embodiments, naive CD4+T lymphocytes are CD45RO−, CD45RA+, CD62L+, CD4+ T cells. In some embodiments, central memory CD4+ cells are CD62L+ and CD45RO+. In some embodiments, effector CD4+ cells are CD62L- and CD45RO−

[0461] In one example, to enrich for CD4+ cells by negative selection, a monoclonal antibody cocktail typically includes antibodies to CD14, CD20, CD1 b, CD16, HLA-DR, and CD8. In some embodiments, the antibody or binding partner is bound to a solid support or matrix, such as a magnetic bead or paramagnetic bead, to allow for separation of cells for positive and/or negative selection. For example, in some embodiments, the cells and cell populations are separated or isolated using immune-magnetic (or affinity-magnetic) separation techniques (reviewed in Methods in Molecular Medicine, vol. 58: Metastasis Research Protocols, Vol. 2: Cell Behavior In Vitro and In Vivo, p 17-25 Edited by: S. A. Brooks and U. Schumacher Humana Press Inc., Totowa, N.J.).

[0462] In some aspects, the sample or composition of cells to be separated is incubated with small, magnetizable or magnetically responsive material, such as magnetically responsive particles or microparticles, such as paramagnetic beads (e.g., such as Dynabeads or MACS beads). The magnetically responsive material, e.g., particle, generally is directly or indirectly attached to a binding partner, e.g., an antibody, that specifically binds to a molecule, e.g., surface marker, present on the cell, cells, or population of cells that it is desired to separate, e.g., that it is desired to negatively or positively select.

[0463] In some embodiments, the magnetic particle or bead comprises a magnetically responsive material bound to a specific binding member, such as an antibody or other binding partner. There are many well-known magnetically responsive materials used in magnetic separation methods. Suitable magnetic particles include those described in Molday, U.S. Pat. No. 4,452,773, and in European Patent Specification EP 452342 B, which are hereby incorporated by reference. Colloidal sized particles, such as those described in Owen U.S. Pat. No. 4,795,698, and Liberti et al., U.S. Pat. No. 5,200,084 are other examples.

[0464] The incubation generally is carried out under conditions whereby the antibodies or binding partners, or molecules, such as secondary antibodies or other reagents, which specifically bind to such antibodies or binding partners, which are attached to the magnetic particle or bead, specifically bind to cell surface molecules if present on cells within the sample.

[0465] In some aspects, the sample is placed in a magnetic field, and those cells having magnetically responsive or magnetizable particles attached thereto will be attracted to the magnet and separated from the unlabeled cells. For positive selection, cells that are attracted to the magnet are retained; for negative selection, cells that are not attracted (unlabeled cells) are retained. In some aspects, a combination of positive and negative selection is performed during the same selection step, where the positive and negative fractions are retained and further processed or subject to further separation steps.

[0466] In certain embodiments, the magnetically responsive particles are coated in primary antibodies or other binding partners, secondary antibodies, lectins, enzymes, or streptavidin. In certain embodiments, the magnetic particles are attached to cells via a coating of primary antibodies specific for one or more markers. In certain embodiments, the cells, rather than the beads, are labeled with a primary antibody or binding partner, and then cell-type specific secondary antibody- or other binding partner (e.g., streptavidin)-coated magnetic particles, are added. In certain embodiments, streptavidin-coated magnetic particles are used in conjunction with biotinylated primary or secondary antibodies.

[0467] In some embodiments, the magnetically responsive particles are left attached to the cells that are to be subsequently incubated, cultured and/or engineered; in some aspects, the particles are left attached to the cells for administration to a patient. In some embodiments, the magnetizable or magnetically responsive particles are removed from the cells. Methods for removing magnetizable particles from cells are known and include, e.g., the use of competing non-labeled antibodies, magnetizable particles or antibodies conjugated to cleavable linkers, etc. In some embodiments, the magnetizable particles are biodegradable.

[0468] In some embodiments, the affinity-based selection is via magnetic-activated cell sorting (MACS) (Miltenyi Biotech, Auburn, Calif.). Magnetic Activated Cell Sorting (MACS) systems are capable of high-purity selection of cells having magnetized particles attached thereto. In certain embodiments, MACS operates in a mode wherein the non-target and target species are sequentially eluted after the application of the external magnetic field. That is, the cells attached to magnetized particles are held in place while the unattached species are eluted. Then, after this first elution step is completed, the species that were trapped in the magnetic field and were prevented from being eluted are freed in some manner such that they can be eluted and recovered. In certain embodiments, the non-target cells are labelled and depleted from the heterogeneous population of cells.

[0469] In certain embodiments, the isolation or separation is carried out using a system, device, or apparatus that carries out one or more of the isolation, cell preparation, separation, processing, incubation, culture, and/or formulation steps of the methods. In some aspects, the system is used to carry out each of these steps in a closed or sterile environment, for example, to minimize error, user handling and/or contamination. In one example, the system is a system as described in International Patent Application, Publication Number WO2009/072003, or US 20110003380 A1.

[0470] In some embodiments, the system or apparatus carries out one or more, e.g., all, of the isolation, processing, engineering, and formulation steps in an integrated or self-contained system, and/or in an automated or programmable fashion. In some aspects, the system or apparatus includes a computer and/or computer program in communication with the system or apparatus, which allows a user to program, control, assess the outcome of, and/or adjust various aspects of the processing, isolation, engineering, and formulation steps.

[0471] In some aspects, the separation and/or other steps is carried out using CliniMACS system (Miltenyi Biotic), for example, for automated separation of cells on a clinical-scale level in a closed and sterile system. Components can include an integrated microcomputer, magnetic separation unit, peristaltic pump, and various pinch valves. The integrated computer in some aspects controls all components of the instrument and directs the system to perform repeated procedures in a standardized sequence. The magnetic separation unit in some aspects includes a movable permanent magnet and a holder for the selection column. The peristaltic pump controls the flow rate throughout the tubing set and, together with the pinch valves, ensures the controlled flow of buffer through the system and continual suspension of cells.

[0472] The CliniMACS system in some aspects uses antibody-coupled magnetizable particles that are supplied in a sterile, non-pyrogenic solution. In some embodiments, after labelling of cells with magnetic particles the cells are washed to remove excess particles. A cell preparation bag is then connected to the tubing set, which in turn is connected to a bag containing buffer and a cell collection bag. The tubing set consists of pre-assembled sterile tubing, including a pre-column and a separation column, and are for single use only. After initiation of the separation program, the system automatically applies the cell sample onto the separation column. Labelled cells are retained within the column, while unlabeled cells are removed by a series of washing steps. In some embodiments, the cell populations for use with the methods described herein are unlabeled and are not retained in the column. In some embodiments, the cell populations for use with the methods described herein are labeled and are retained in the column. In some embodiments, the cell populations for use with the methods described herein are eluted from the column after removal of the magnetic field, and are collected within the cell collection bag.

[0473] In certain embodiments, separation and/or other steps are carried out using the CliniMACS Prodigy system (Miltenyi Biotec). The CliniMACS Prodigy system in some aspects is equipped with a cell processing unity that permits automated washing and fractionation of cells by centrifugation. The CliniMACS Prodigy system can also include an onboard camera and image recognition software that determines the optimal cell fractionation endpoint by discerning the macroscopic layers of the source cell product. For example, peripheral blood may be automatically separated into erythrocytes, white blood cells and plasma layers. The CliniMACS Prodigy system can also include an integrated cell cultivation chamber which accomplishes cell culture protocols such as, e.g., cell differentiation and expansion, antigen loading, and long-term cell culture. Input ports can allow for the sterile removal and replenishment of media and cells can be monitored using an integrated microscope. See, e.g., Klebanoff et al. (2012) J Immunother. 35(9): 651-660, Terakura et al. (2012) Blood. 1:72-82, and Wang et al. (2012) J Immunother. 35(9):689-701.

[0474] In some embodiments, a cell population described herein is collected and enriched (or depleted) via flow cytometry, in which cells stained for multiple cell surface markers are carried in a fluidic stream. In some embodiments, a cell population described herein is collected and enriched (or depleted) via preparative scale (FACS)-sorting. In certain embodiments, a cell population described herein is collected and enriched (or depleted) by use of microelectromechanical systems (MEMS) chips in combination with a FACS-based detection system (see, e.g., WO 2010/033140, Cho et al. (2010) Lab Chip 10, 1567-1573; and Godin et al. (2008) J Biophoton. 1(5):355-376. In both cases, cells can be labeled with multiple markers, allowing for the isolation of well-defined T cell subsets at high purity.

[0475] In some embodiments, the antibodies or binding partners are labeled with one or more detectable marker, to facilitate separation for positive and/or negative selection. For example, separation may be based on binding to fluorescently labeled antibodies. In some examples, separation of cells based on binding of antibodies or other binding partners specific for one or more cell surface markers are carried in a fluidic stream, such as by fluorescence-activated cell sorting (FACS), including preparative scale (FACS) and/or microelectromechanical systems (MEMS) chips, e.g., in combination with a flow-cytometric detection system. Such methods allow for positive and negative selection based on multiple markers simultaneously.

[0476] In some embodiments, the preparation methods include steps for freezing, e.g., cryopreserving, the cells, either before or after isolation, incubation, and/or engineering. In some embodiments, the freeze and subsequent thaw step removes granulocytes and, to some extent, monocytes in the cell population. In some embodiments, the cells are suspended in a freezing solution, e.g., following a washing step to remove plasma and platelets. Any of a variety of known freezing solutions and parameters in some aspects may be used. One example involves using PBS containing 20% DMSO and 8% human serum albumin (HSA), or other suitable cell freezing media. This can then be diluted 1:1 with media so that the final concentration of DMSO and HSA are 10% and 4%, respectively. Other examples include Cryostor®, CTL-Cryo™ ABC freezing media, and the like. The cells are then frozen to −80 degrees C. at a rate of 1 degree per minute and stored in the vapor phase of a liquid nitrogen storage tank.

[0477] In some embodiments, the provided methods include cultivation, incubation, culture, and/or genetic engineering steps. For example, in some embodiments, provided are methods for incubating and/or engineering the depleted cell populations and culture-initiating compositions.

[0478] Thus, in some embodiments, the cell populations are incubated in a culture-initiating composition. The incubation and/or engineering may be carried out in a culture vessel, such as a unit, chamber, well, column, tube, tubing set, valve, vial, culture dish, bag, or other container for culture or cultivating cells.

[0479] In some embodiments, the cells are incubated and/or cultured prior to or in connection with genetic engineering. The incubation steps can include culture, cultivation, stimulation, activation, and/or propagation. In some embodiments, the compositions or cells are incubated in the presence of stimulating conditions or a stimulatory agent. Such conditions include those designed to induce proliferation, expansion, activation, and/or survival of cells in the population, to mimic antigen exposure, and/or to prime the cells for genetic engineering, such as for the introduction of a recombinant antigen receptor.

[0480] The conditions can include one or more of particular media, temperature, oxygen content, carbon dioxide content, time, agents, e.g., nutrients, amino acids, antibiotics, ions, and/or stimulatory factors, such as cytokines, chemokines, antigens, binding partners, fusion proteins, recombinant soluble receptors, and any other agents designed to activate the cells.

[0481] In some embodiments, the stimulating conditions or agents include one or more agent, e.g., ligand, which is capable of activating an intracellular signaling domain of a TCR complex. In some aspects, the agent turns on or initiates TCR/CD3 intracellular signaling cascade in a T cell. Such agents can include antibodies, such as those specific for a TCR component and/or costimulatory receptor, e.g., anti-CD3, anti-CD28, for example, bound to solid support such as a bead, and/or one or more cytokines. Optionally, the expansion method may further comprise the step of adding anti-CD3 and/or anti CD28 antibody to the culture medium (e.g., at a concentration of at least about 0.5 ng/ml). In some embodiments, the stimulating agents include IL-2 and/or IL-15, for example, an IL-2 concentration of at least about 10 units/mL.

[0482] In some aspects, incubation is carried out in accordance with techniques such as those described in U.S. Pat. No. 6,040,177 to Riddell et al., Klebanoff et al. (2012) J Immunother. 35(9): 651-660, Terakura et al. (2012) Blood. 1:72-82, and/or Wang et al. (2012) J Immunother. 35(9):689-701.

[0483] In some embodiments, the T cells are expanded by adding to the culture-initiating composition feeder cells, such as non-dividing peripheral blood mononuclear cells (PBMC), (e.g., such that the resulting population of cells contains at least about 5, 10, 20, or 40 or more PBMC feeder cells for each T lymphocyte in the initial population to be expanded); and incubating the culture (e.g. for a time sufficient to expand the numbers of T cells). In some aspects, the non-dividing feeder cells can comprise gamma-irradiated PBMC feeder cells. In some embodiments, the PBMC are irradiated with gamma rays in the range of about 3000 to 3600 rads to prevent cell division. In some embodiments, the PBMC feeder cells are inactivated with Mytomicin C. In some aspects, the feeder cells are added to culture medium prior to the addition of the populations of T cells.

[0484] In some embodiments, the stimulating conditions include temperature suitable for the growth of human T lymphocytes, for example, at least about 25 degrees Celsius, generally at least about 30 degrees, and generally at or about 37 degrees Celsius. Optionally, the incubation may further comprise adding non-dividing EBV-transformed lymphoblastoid cells (LCL) as feeder cells. LCL can be irradiated with gamma rays in the range of about 6000 to 10,000 rads. The LCL feeder cells in some aspects is provided in any suitable amount, such as a ratio of LCL feeder cells to initial T lymphocytes of at least about 10:1.

[0485] In embodiments, antigen-specific T cells, such as antigen-specific CD4+ and/or CD8+ T cells, are obtained by stimulating naive or antigen specific T lymphocytes with antigen. For example, antigen-specific T cell lines or clones can be generated to cytomegalovirus antigens by isolating T cells from infected subjects and stimulating the cells in vitro with the same antigen.

[0486] Assays

[0487] A variety of assays known in the art may be used to identify and characterize an HLA-PEPTIDE ABP provided herein.

### Binding, Competition, and Epitope Mapping Assays

[0488] Specific antigen-binding activity of an ABP provided herein may be evaluated by any suitable method, including using SPR, BLI, RIA and MSD-SET, as described elsewhere in this disclosure. Additionally, antigen-binding activity may be evaluated by ELISA assays, using flow cytometry, and/or Western blot assays.

[0489] Assays for measuring competition between two ABPs, or an ABP and another molecule (e.g., one or more ligands of HLA-PEPTIDE such as a TCR) are described elsewhere in this disclosure and, for example, in Harlow and Lane, ABPs: A Laboratory Manual ch. 14, 1988, Cold Spring Harbor Laboratory, Cold Spring Harbor, N.Y, incorporated by reference in its entirety.

[0490] Assays for mapping the epitopes to which an ABP provided herein bind are described, for example, in Morris “Epitope Mapping Protocols,” in Methods in Molecular Biology vol. 66, 1996, Humana Press, Totowa, N.J., incorporated by reference in its entirety. In some embodiments, the epitope is determined by peptide competition. In some embodiments, the epitope is determined by mass spectrometry. In some embodiments, the epitope is determined by mutagenesis. In some embodiments, the epitope is determined by crystallography.

### Assays for Effector Functions

[0491] Effector function following treatment with an ABP and/or cell provided herein may be evaluated using a variety of in vitro and in vivo assays known in the art, including those described in Ravetch and Kinet, Annu. Rev Immunol., 1991, 9:457-492; U.S. Pat. Nos. 5,500,362, 5,821,337; Hellstrom et al., Proc. Nat'l Acad. Sci. USA, 1986, 83:7059-7063; Hellstrom et al., Proc. Nat'l Acad. Sci. USA, 1985, 82:1499-1502; Bruggemann et al., J. Exp. Med., 1987, 166:1351-1361; Clynes et al., Proc. Nat'l Acad. Sci. USA, 1998, 95:652-656; WO 2006/029879; WO 2005/100402; Gazzano-Santoro et al., J. Immunol. Methods, 1996, 202:163-171; Cragg et al., Blood, 2003, 101:1045-1052; Cragg et al. Blood, 2004, 103:2738-2743; and Petkova et al., Int'l. Immunol., 2006, 18:1759-1769; each of which is incorporated by reference in its entirety.

[0492] Pharmaceutical Compositions

[0493] An ABP, cell, or HLA-PEPTIDE target provided herein can be formulated in any appropriate pharmaceutical composition and administered by any suitable route of administration. Suitable routes of administration include, but are not limited to, the intra-arterial, intradermal, intramuscular, intraperitoneal, intravenous, nasal, parenteral, pulmonary, and subcutaneous routes.

[0494] The pharmaceutical composition may comprise one or more pharmaceutical excipients. Any suitable pharmaceutical excipient may be used, and one of ordinary skill in the art is capable of selecting suitable pharmaceutical excipients. Accordingly, the pharmaceutical excipients provided below are intended to be illustrative, and not limiting. Additional pharmaceutical excipients include, for example, those described in the Handbook of Pharmaceutical Excipients, Rowe et al. (Eds.) 6th Ed. (2009), incorporated by reference in its entirety.

[0495] In some embodiments, the pharmaceutical composition comprises an anti-foaming agent. Any suitable anti-foaming agent may be used. In some aspects, the anti-foaming agent is selected from an alcohol, an ether, an oil, a wax, a silicone, a surfactant, and combinations thereof. In some aspects, the anti-foaming agent is selected from a mineral oil, a vegetable oil, ethylene bis stearamide, a paraffin wax, an ester wax, a fatty alcohol wax, a long chain fatty alcohol, a fatty acid soap, a fatty acid ester, a silicon glycol, a fluorosilicone, a polyethylene glycol-polypropylene glycol copolymer, polydimethyl siloxane-silicon dioxide, ether, octyl alcohol, capryl alcohol, sorbitan trioleate, ethyl alcohol, 2-ethyl-hexanol, dimethicone, oleyl alcohol, simethicone, and combinations thereof.

[0496] In some embodiments, the pharmaceutical composition comprises a co-solvent. Illustrative examples of co-solvents include ethanol, poly(ethylene) glycol, butylene glycol, dimethylacetamide, glycerin, propylene glycol, and combinations thereof.

[0497] In some embodiments, the pharmaceutical composition comprises a buffer. Illustrative examples of buffers include acetate, borate, carbonate, lactate, malate, phosphate, citrate, hydroxide, diethanolamine, monoethanolamine, glycine, methionine, guar gum, monosodium glutamate, and combinations thereof.

[0498] In some embodiments, the pharmaceutical composition comprises a carrier or filler. Illustrative examples of carriers or fillers include lactose, maltodextrin, mannitol, sorbitol, chitosan, stearic acid, xanthan gum, guar gum, and combinations thereof.

[0499] In some embodiments, the pharmaceutical composition comprises a surfactant. Illustrative examples of surfactants include d-alpha tocopherol, benzalkonium chloride, benzethonium chloride, cetrimide, cetylpyridinium chloride, docusate sodium, glyceryl behenate, glyceryl monooleate, lauric acid, macrogol 15 hydroxystearate, myristyl alcohol, phospholipids, polyoxyethylene alkyl ethers, polyoxyethylene sorbitan fatty acid esters, polyoxyethylene stearates, polyoxylglycerides, sodium lauryl sulfate, sorbitan esters, vitamin E polyethylene(glycol) succinate, and combinations thereof.

[0500] In some embodiments, the pharmaceutical composition comprises an anti-caking agent. Illustrative examples of anti-caking agents include calcium phosphate (tribasic), hydroxymethyl cellulose, hydroxypropyl cellulose, magnesium oxide, and combinations thereof.

[0501] Other excipients that may be used with the pharmaceutical compositions include, for example, albumin, antioxidants, antibacterial agents, antifungal agents, bioabsorbable polymers, chelating agents, controlled release agents, diluents, dispersing agents, dissolution enhancers, emulsifying agents, gelling agents, ointment bases, penetration enhancers, preservatives, solubilizing agents, solvents, stabilizing agents, sugars, and combinations thereof. Specific examples of each of these agents are described, for example, in the Handbook of Pharmaceutical Excipients, Rowe et al. (Eds.) 6th Ed. (2009), The Pharmaceutical Press, incorporated by reference in its entirety.

[0502] In some embodiments, the pharmaceutical composition comprises a solvent. In some aspects, the solvent is saline solution, such as a sterile isotonic saline solution or dextrose solution. In some aspects, the solvent is water for injection.

[0503] In some embodiments, the pharmaceutical compositions are in a particulate form, such as a microparticle or a nanoparticle. Microparticles and nanoparticles may be formed from any suitable material, such as a polymer or a lipid. In some aspects, the microparticles or nanoparticles are micelles, liposomes, or polymersomes.

[0504] Further provided herein are anhydrous pharmaceutical compositions and dosage forms comprising an ABP, since water can facilitate the degradation of some ABPs.

[0505] Anhydrous pharmaceutical compositions and dosage forms provided herein can be prepared using anhydrous or low moisture containing ingredients and low moisture or low humidity conditions. Pharmaceutical compositions and dosage forms that comprise lactose and at least one active ingredient that comprises a primary or secondary amine can be anhydrous if substantial contact with moisture and/or humidity during manufacturing, packaging, and/or storage is expected.

[0506] An anhydrous pharmaceutical composition should be prepared and stored such that its anhydrous nature is maintained. Accordingly, anhydrous compositions can be packaged using materials known to prevent exposure to water such that they can be included in suitable formulary kits. Examples of suitable packaging include, but are not limited to, hermetically sealed foils, plastics, unit dose containers (e.g., vials), blister packs, and strip packs.

[0507] In certain embodiments, an ABP and/or cell provided herein is formulated as parenteral dosage forms. Parenteral dosage forms can be administered to subjects by various routes including, but not limited to, subcutaneous, intravenous (including infusions and bolus injections), intramuscular, and intra-arterial. Because their administration typically bypasses subjects' natural defenses against contaminants, parenteral dosage forms are typically, sterile or capable of being sterilized prior to administration to a subject. Examples of parenteral dosage forms include, but are not limited to, solutions ready for injection, dry (e.g., lyophilized) products ready to be dissolved or suspended in a pharmaceutically acceptable vehicle for injection, suspensions ready for injection, and emulsions.

[0508] Suitable vehicles that can be used to provide parenteral dosage forms are well known to those skilled in the art. Examples include, but are not limited to: Water for Injection USP; aqueous vehicles such as, but not limited to, Sodium Chloride Injection, Ringer's Injection, Dextrose Injection, Dextrose and Sodium Chloride Injection, and Lactated Ringer's Injection; water miscible vehicles such as, but not limited to, ethyl alcohol, polyethylene glycol, and polypropylene glycol; and non-aqueous vehicles such as, but not limited to, corn oil, cottonseed oil, peanut oil, sesame oil, ethyl oleate, isopropyl myristate, and benzyl benzoate.

[0509] Excipients that increase the solubility of one or more of the ABPs and/or cells disclosed herein can also be incorporated into the parenteral dosage forms.

[0510] In some embodiments, the parenteral dosage form is lyophilized. Exemplary lyophilized formulations are described, for example, in U.S. Pat. Nos. 6,267,958 and 6,171,586; and WO 2006/044908; each of which is incorporated by reference in its entirety.

[0511] In human therapeutics, the doctor will determine the posology which he considers most appropriate according to a preventive or curative treatment and according to the age, weight, condition and other factors specific to the subject to be treated.

[0512] In certain embodiments, a composition provided herein is a pharmaceutical composition or a single unit dosage form. Pharmaceutical compositions and single unit dosage forms provided herein comprise a prophylactically or therapeutically effective amount of one or more prophylactic or therapeutic ABP.

[0513] The amount of the ABP, cell, or composition which will be effective in the prevention or treatment of a disorder or one or more symptoms thereof will vary with the nature and severity of the disease or condition, and the route by which the ABP and/or cell is administered. The frequency and dosage will also vary according to factors specific for each subject depending on the specific therapy (e.g., therapeutic or prophylactic agents) administered, the severity of the disorder, disease, or condition, the route of administration, as well as age, body, weight, response, and the past medical history of the subject. Effective doses may be extrapolated from dose-response curves derived from in vitro or animal model test systems.

[0514] Different therapeutically effective amounts may be applicable for different diseases and conditions, as will be readily known by those of ordinary skill in the art. Similarly, amounts sufficient to prevent, manage, treat or ameliorate such disorders, but insufficient to cause, or sufficient to reduce, adverse effects associated with the ABPs and/or cells provided herein are also encompassed by the dosage amounts and dose frequency schedules provided herein. Further, when a subject is administered multiple dosages of a composition provided herein, not all of the dosages need be the same. For example, the dosage administered to the subject may be increased to improve the prophylactic or therapeutic effect of the composition or it may be decreased to reduce one or more side effects that a particular subject is experiencing.

[0515] In certain embodiments, treatment or prevention can be initiated with one or more loading doses of an ABP or composition provided herein followed by one or more maintenance doses.

[0516] In certain embodiments, a dose of an ABP, cell, or composition provided herein can be administered to achieve a steady-state concentration of the ABP and/or cell in blood or serum of the subject. The steady-state concentration can be determined by measurement according to techniques available to those of skill or can be based on the physical characteristics of the subject such as height, weight and age.

[0517] As discussed in more detail elsewhere in this disclosure, an ABP and/or cell provided herein may optionally be administered with one or more additional agents useful to prevent or treat a disease or disorder. The effective amount of such additional agents may depend on the amount of ABP present in the formulation, the type of disorder or treatment, and the other factors known in the art or described herein.

[0518] Therapeutic Applications

[0519] For therapeutic applications, ABPs and/or cells are administered to a mammal, generally a human, in a pharmaceutically acceptable dosage form such as those known in the art and those discussed above. For example, ABPs and/or cells may be administered to a human intravenously as a bolus or by continuous infusion over a period of time, by intramuscular, intraperitoneal, intra-cerebrospinal, subcutaneous, intra-articular, intrasynovial, intrathecal, or intratumoral routes. The ABPs also are suitably administered by peritumoral, intralesional, or perilesional routes, to exert local as well as systemic therapeutic effects. The intraperitoneal route may be particularly useful, for example, in the treatment of ovarian tumors.

[0520] The ABPs and/or cells provided herein can be useful for the treatment of any disease or condition involving HLA-PEPTIDE. In some embodiments, the disease or condition is a disease or condition that can benefit from treatment with an anti-HLA-PEPTIDE ABP and/or cell. In some embodiments, the disease or condition is a tumor. In some embodiments, the disease or condition is a cell proliferative disorder. In some embodiments, the disease or condition is a cancer.

[0521] In some embodiments, the ABPs and/or cells provided herein are provided for use as a medicament. In some embodiments, the ABPs and/or cells provided herein are provided for use in the manufacture or preparation of a medicament. In some embodiments, the medicament is for the treatment of a disease or condition that can benefit from an anti-HLA-PEPTIDE ABP and/or cell. In some embodiments, the disease or condition is a tumor. In some embodiments, the disease or condition is a cell proliferative disorder. In some embodiments, the disease or condition is a cancer.

[0522] In some embodiments, provided herein is a method of treating a disease or condition in a subject in need thereof by administering an effective amount of an ABP and/or cell provided herein to the subject. In some aspects, the disease or condition is a cancer.

[0523] In some embodiments, provided herein is a method of treating a disease or condition in a subject in need thereof by administering an effective amount of an ABP and/or cell provided herein to the subject, wherein the disease or condition is a cancer, and the cancer is selected from a solid tumor and a hematological tumor.

[0524] In some embodiments, provided herein is a method of modulating an immune response in a subject in need thereof, comprising administering to the subject an effective amount of an ABP and/or cell or a pharmaceutical composition disclosed herein.

[0525] Combination Therapies

[0526] In some embodiments, an ABP and/or cell provided herein is administered with at least one additional therapeutic agent. Any suitable additional therapeutic agent may be administered with an ABP and/or cell provided herein. An additional therapeutic agent can be fused to an ABP. In some aspects, the additional therapeutic agent is selected from radiation, a cytotoxic agent, a toxin, a chemotherapeutic agent, a cytostatic agent, an anti-hormonal agent, an EGFR inhibitor, an immunomodulatory agent, an anti-angiogenic agent, and combinations thereof. In some embodiments, the additional therapeutic agent is an ABP.

[0527] Diagnostic Methods

[0528] Also provided are methods for predicting and/or detecting the presence of a given HLA-PEPTIDE on a cell from a subject. Such methods may be used, for example, to predict and evaluate responsiveness to treatment with an ABP and/or cell provided herein.

[0529] In some embodiments, a blood or tumor sample is obtained from a subject and the fraction of cells expressing HLA-PEPTIDE is determined. In some aspects, the relative amount of HLA-PEPTIDE expressed by such cells is determined. The fraction of cells expressing HLA-PEPTIDE and the relative amount of HLA-PEPTIDE expressed by such cells can be determined by any suitable method. In some embodiments, flow cytometry is used to make such measurements. In some embodiments, fluorescence assisted cell sorting (FACS) is used to make such measurement. See Li et al., J. Autoimmunity, 2003, 21:83-92 for methods of evaluating expression of HLA-PEPTIDE in peripheral blood.

[0530] In some embodiments, detecting the presence of a given HLA-PEPTIDE on a cell from a subject is performed using immunoprecipitation and mass spectrometry. This can be performed by obtaining a tumor sample (e.g., a frozen tumor sample) such as a primary tumor specimen and applying immunoprecipitation to isolate one or more peptides. The HLA alleles of the tumor sample can be determined experimentally or obtained from a third party source. The one or more peptides can be subjected to MS to determine their sequence(s). The spectra from the MS can then be searched against a database. An example is provided in the Examples section below.

[0531] In some embodiments, predicting the presence of a given HLA-PEPTIDE on a cell from a subject is performed using a computer-based model applied to the peptide sequence and/or RNA measurements of one or more genes comprising that peptide sequence (e.g., RNA seq or RT-PCR, or nanostring) from a tumor sample. The model used can be as described in international patent application no. PCT/US2016/067159, herein incorporated by reference, in its entirety, for all purposes.

[0532] Kits

[0533] Also provided are kits comprising an ABP and/or cell provided herein. The kits may be used for the treatment, prevention, and/or diagnosis of a disease or disorder, as described herein.

[0534] In some embodiments, the kit comprises a container and a label or package insert on or associated with the container. Suitable containers include, for example, bottles, vials, syringes, and IV solution bags. The containers may be formed from a variety of materials, such as glass or plastic. The container holds a composition that is by itself, or when combined with another composition, effective for treating, preventing and/or diagnosing a disease or disorder. The container may have a sterile access port. For example, if the container is an intravenous solution bag or a vial, it may have a port that can be pierced by a needle. At least one active agent in the composition is an ABP provided herein. The label or package insert indicates that the composition is used for treating the selected condition.

[0535] In some embodiments, the kit comprises (a) a first container with a first composition contained therein, wherein the first composition comprises an ABP and/or cell provided herein; and (b) a second container with a second composition contained therein, wherein the second composition comprises a further therapeutic agent. The kit in this embodiment can further comprise a package insert indicating that the compositions can be used to treat a particular condition, e.g., cancer.

[0536] Alternatively, or additionally, the kit may further comprise a second (or third) container comprising a pharmaceutically-acceptable excipient. In some aspects, the excipient is a buffer. The kit may further include other materials desirable from a commercial and user standpoint, including filters, needles, and syringes.

### EXAMPLES

[0537] Below are examples of specific embodiments for carrying out the present invention. The examples are offered for illustrative purposes only, and are not intended to limit the scope of the present invention in any way. Efforts have been made to ensure accuracy with respect to numbers used (e.g., amounts, temperatures, etc.), but some experimental error and deviation should, of course, be allowed for.

[0538] The practice of the present invention will employ, unless otherwise indicated, conventional methods of protein chemistry, biochemistry, recombinant DNA techniques and pharmacology, within the skill of the art. Such techniques are explained fully in the literature. See, e.g., T. E. Creighton, Proteins: Structures and Molecular Properties (W.H. Freeman and Company, 1993); A. L. Lehninger, Biochemistry (Worth Publishers, Inc., current addition); Sambrook, et al., Molecular Cloning: A Laboratory Manual (2nd Edition, 1989); Methods In Enzymology (S. Colowick and N. Kaplan eds., Academic Press, Inc.); Remington's Pharmaceutical Sciences, 18th Edition (Easton, Pa.: Mack Publishing Company, 1990); Carey and Sundberg Advanced Organic Chemistry 3^{rd} Ed. (Plenum Press) Vols A and B(1992).

### Example 1: Identification of Predicted HLA-PEPTIDE Complexes

[0539] We identified cancer specific HLA-peptide targets using three computational steps: First, we identified genes that are not generally expressed in most normal tissues using data available through the Genotype-Tissue Expression (GTEx) Project [1]. We then identified which of those genes are aberrantly expressed in cancer samples using data from The Cancer Genome Atlas (TCGA) Research Network: http://cancergenome.nih.gov/. In these genes, we identified which peptides are likely to be presented as cell surface antigens by MHC Class I proteins using a deep learning model trained on HLA presented peptides sequenced by MS/MS, as described in international patent application no. PCT/US2016/067159, herein incorporated by reference, in its entirety, for all purposes.

[0540] To identify genes that are not usually expressed in normal tissues, we obtained aggregated gene expression data from the Genotype-Tissue Expression (GTEx) Project (version V6p). This dataset comprised 8,555 post-mortem samples from over 50 tissue types. Expression was measured using RNA-Seq and computationally processed according to the GTEx standard pipeline (https://www.gtexportal.org/home/documentationPage). For the purposes of this analysis, genes were considered not expressed in normal tissues if they were found not to be expressed in any tissues in GTEx or were only expressed in one or more of testis, minor salivary gland, and the endocervix (i.e., immune privileged or non-essential tissues). We also restricted our search to only include protein coding genes. Because GTEx and TCGA use different annotations of the human genome in their computational analyses, we excluded genes which we could not map between the two datasets using standard techniques such as ENCODE mappings.

[0541] We sought to define criteria to excluded genes that were expressed in normal tissue that was strict to ensure tumor specificity, but would not exclude non-zero measurements arising from sporadic, low level transcription or potential artifacts such as read misalignment. Therefore, we designated a gene to be not normally expressed in a non-immune privileged or essential tissue if its median expression across GTEx samples was less than 0.5 RPKM (Reads Per Kilobase of transcript per Million mapped reads), and it was never expressed with greater than 10 RPKM, and it was expressed at 5 RPKM in no more than two samples across all essential tissue samples. To exclude genes which were potentially expressed but could not be measured by RNA-Seq using the GTEX analysis pipeline, we also excluded genes which were measured at 0 RPKM in all samples. These criteria left us with a set of protein coding genes that did not appear to be expressed in most normal tissues.

[0542] We next sought to identify which of these genes are aberrantly expressed in tumors. We examined 11,093 samples available from TCGA (Data Release 6.0). We considered a gene expressed if it was observed at expression of at least 5 FPKM (Fragments Per Kilobase of transcript per Million mapped reads) in at least 5 samples. Because one fragment usually consists of two mapped reads, 5 FPKM equals approximately 10 RPKM.

[0543] While the GTEx data spans a broad range of tissue types, it does not include all cell types that are present in the human body. We therefore further examined the list for the gene's biological function category using the DAVID v 6.8 [2] and used this analysis, along with literature review, to filter the gene list further. We removed genes likely to be expressed in immune cells (e.g., interferon family genes), eye-related genes (e.g., retina in the FANTOM5 dataset http://www.proteinatlas.org), genes expressed in the mouth and nose (e.g. olfactory genes and taste receptors), and genes related to the circadian cycle. We also excluded genes that are part of large gene families, including histone genes, because their expression is difficult to accurately assess with RNA Sequencing due to sequence homology.

[0544] We then examined the distribution of the expression of the remaining genes across the TCGA samples. When we examined the known Cancer Testis Antigens (CTAs), e.g., the MAGE family of genes, we observed that the expression of these genes in log space was generally characterized by a bimodal distribution across samples in the TCGA. This distribution included a left mode around a lower expression value and a right mode (or thick tail) at a higher expression level. This expression pattern is consistent with a biological model in which some minimal expression is detected at baseline in all samples and higher expression of the gene is observed in a subset of tumors experiencing epigenetic dysregulation. We reviewed the distribution of expression of each gene across TCGA samples and discarded those where we observed only a unimodal distribution with no significant right-hand tail, as this distribution may (as a non-limiting example) more likely characterize genes that have a low baseline of expression in normal tissues.

[0545] This left us with a remaining gene list of >630 genes that was highly enriched for genes involved in testis-specific biological processes and development. Because many of these genes produce different isoforms, these genes mapped to >1,200 proteins using the UNIPROT mapping service. In addition to the genes that met our strict computational criteria, we added several genes that have previously been identified in the scientific literature as cancer testes antigens.

[0546] To identify the peptides that are likely to be presented as cell surface antigens by MHC Class I proteins, we used a sliding window to parse each of these proteins into its constituent 8-11 amino acid sequences. We processed these peptides and their flanking sequences with the HLA peptide presentation deep learning model to calculate the likelihood of presentation of each peptide at expression levels between five TPM, which approximately corresponds to one transcript per cell [3], to 200 TPM (i.e., a high level of expression). We considered a peptide a putative HLA-PEPTIDE target if its probability of presentation calculated by our model was greater than 0.1 in 10 or more patients in the TCGA dataset with expression 5 TPM or greater.

[0547] The results are shown in Table A. From this example, there are >1,800 HLA-PEPTIDE targets across ˜400 genes and 25 analyzed HLA alleles. For clarity, each HLA-PEPTIDE was assigned a target number in Table A. For example, HLA-PEPTIDE target 1 is HLA-A*01:01_EVDPIGHLY, HLA-PEPTIDE target 2 is HLA-A*29:02_FVQENYLEY, and so forth.

[0548] Collectively, this list of HLA-PEPTIDE targets is expected to be a significant contribution to the state of knowledge of cancer specific targets. In summary, the example provides a large set of tumor-specific HLA-PEPTIDEs that can be pursued as candidate targets for ABP research and development.

### REFERENCES

[0549] 1. Consortium, G T., The Genotype-Tissue Expression (GTEx) project. Nat Genet, 2013. 45(6): p. 580-5.
[0550] 2. Huang da, W., B. T. Sherman, and R. A. Lempicki, Systematic and integrative analysis of large gene lists using DAVID bioinformatics resources. Nat Protoc, 2009. 4(1): p. 44-57.
[0551] 3. Shapiro, E., T. Biezuner, and S. Linnarsson, Single-cell sequencing-based technologies will revolutionize whole-organism science. Nat Rev Genet, 2013. 14(9): p. 618-30.

### Example 2: Initial Validation of Predicted HLA-PEPTIDE Complexes

[0552] As an initial assessment to validate the predicted HLA-PEPTIDE targets arising from the above described approach, we evaluated public databases and selected literature for reports of these targets as having been previously identified by various assay techniques, including HLA binding affinity measurements, HLA peptide mass-spectrometry, as well as measures of T cell responses. Two comprehensive databases containing assay result annotations for HLA-PEPTIDE pairs were used: IEDB (Vita et al., 2015) and Tantigen (Olsen et al., 2017). We determined that 19 (15 unique across genes) of the computationally predicted targets were previously reported in the databases, many in genes (e.g., cancer testis antigens) that have long been the subject of study in cancer immunology. See Table B.

TABLE B

| | | Found in | | |
|---|---|---|---|---|
| Protein | | IEDB or | IEDB | Tantigen |
| Name | HLA-PEPTIDE | Tantigen | Status | Status |
| MAGA3 | HLA-A*01:01_EVDPIGHLY TRUE | Found | Found | |
| MAGA3 | HLA-A*29:02_FVQENYLEY | TRUE | Found | Not found |
| MAGA3 | HLA-A*29:02_LVHFLLLKY | TRUE | Found | Not found |
| MAGA3 | HLA-B*44:03_MEVDPIGHLY TRUE | Not found | Found | |
| MAGA6 | HLA-A*29:02_FVQENYLEY | TRUE | Found | Not found |
| MAGA6 | HLA-A*29:02_LVHFLLLKY | TRUE | Found | Not found |
| MAGA4 | HLA-A*01:01_EVDPASNTY | TRUE | Not found | Found |
| MAGA1 | HLA-A*02:01_KVLEYVIKV | TRUE | Found | Found |
| MAGAC | HLA-A*29:02_LVHFLLLKY | TRUE | Found | Not found |
| MAGAC | HLA-A*29:02_LVQENYLEY | TRUE | Found | Not found |
| SSX1 | HLA-C*04:01_AFDDIATYF | TRUE | Found | Not found |
| MAGA4 | HLA-A*29:02_WVQENYLEY | TRUE | Found | Not found |
| MAGB2 | HLA-A*02:01_GVYDGEEHSV | TRUE | Found | Not found |
| MAGA1 | HLA-A*03:01_SLFRAVITK | TRUE | Found | Found |
| MAGA4 | HLA-A*11:01_ALAETSYVK | TRUE | Found | Not found |
| SAGE1 | HLA-A*24:02_LYATVIHDI | TRUE | Not found | Found |
| PASD1 | HLA-A*02:01_QLLDGFMITL | TRUE | Found | Not found |
| MAGA8 | HLA-A*29:02_WVQENYLEY | TRUE | Found | Not found |
| MAGAC | HLA-A*29:02_STLPTTINY | TRUE | Found | Not found |

[0553] Additional limited literature review was carried out for peptides not found in the above public databases. The following peptides were identified, as shown in Table C:

TABLE C

| | | HLA/peptide known | HLA/peptide known status in |
|---|---|---|---|
| | Protein | status IEDB or | literature (preliminary) if |
| HLA allele/peptide complex | Name | Tantig 2017 | not in IEDB or Tantigen |
| HLA-A*01:01_NTDNNLAVY | KKLC1 | Not known | WO 2017/089756 A1 |
| | | | (Stevanovićetal., 2017) |
| HLA-B*35:01_YPAPLESLDY | PRA10 | Not known | W02008118017 A2 |
| HLA-A*11:01_ATLENLLSH | PRAM4 | Not known | W02008118017 A2 |
| HLA-B*51:01_DALLAQKV | PRA12 | Not known | W02008118017 A2 |
| HLA-B*44:03_SESDLKHLSW | PRA12 | Not known | W02008118017 A2 |
| HLA-A*11:01_ATLENLLSH | PRAM9 | Not known | W02008118017 A2 |
| HLA-A*02:07_TLDEYLTYL | PRAM9 | Not known | W02008118017 A2 |

[0554] One notable example from Table C was KKLC1 HLA-A*01:01_NTDNNLAVY. Kita-kyushu lung cancer antigen-1 (KK-LC-1; CT83) is a cancer testis antigen (CTA) that has been shown to be widely expressed in many different cancer types. It was originally discovered based on a cloned CTL to KK-LC-1 peptide 76-84—RQKRILVNL (Fukuyama et al., 2006). More recently Stevanovic et al., 2017 revealed another peptide from KK-LC-1 recognized by a CTL in a patient with cervical cancer, the predicted peptide KK-LC-1 52-60 NTDNNLAVY The corresponding TCR for this CTL is now listed on the NIH website https://www.ott.nih.gov/technology/e-153-2016/ and the peptide is listed in WO 2017/089756 A1, herein incorporated by reference, in its entirety, for all purposes.

[0555] This example highlights the expected value of predicted HLA-PEPTIDE targets in Table A: Although no information on which CTA HLA-PEPTIDE targets were previously known was incorporated in the prediction, the analysis yielded many targets that were described in the literature, indicating that many of the novel targets can likewise be validated experimentally and ultimately serve as targets for one or more ABPs.

### REFERENCES

[0556] Fukuyama, T., Hanagiri, T., Takenoyama, M., Ichiki, Y, Mizukami, M., So, T., Sugaya, M., So, T., Sugio, K., and Yasumoto, K. (2006). Identification of a new cancer/germline gene, KK-LC-1, encoding an antigen recognized by autologous CTL induced on human lung adenocarcinoma. Cancer Res. 66, 4922-4928.
[0557] Olsen, L. R., Tongchusak, S., Lin, H., Reinherz, E. L., Brusic, V., and Zhang, G. L. (2017). TANTIGEN: a comprehensive database of tumor T cell antigens. Cancer Immunol. Immunother. CII 66, 731-735.
[0558] Stevanovic, S., Pasetto, A., Helman, S. R., Gartner, J. J., Prickett, T. D., Howie, B., Robins, H. S., Robbins, P F., Klebanoff, C. A., Rosenberg, S. A., et al. (2017). Landscape of immunogenic tumor antigens in successful immunotherapy of virally induced epithelial cancer. Science 356, 200-205.
[0559] Vita, R., Overton, J. A., Greenbaum, J. A., Ponomarenko, J., Clark, J. D., Cantrell, J. R., Wheeler, D. K., Gabbard, J. L., Hix, D., Sette, A., et al. (2015). The immune epitope database (IEDB) 3.0. Nucleic Acids Res. 43, D405-412.

### Example 3: Identification of Predicted HLA-PEPTIDE Complexes

[0560] Next, HLA-peptide targets from proteins of seven genes were identified: AFP, KKLC-1, MAGE-A4, MAGE-A10, MART-1, NY-ESO-1, and WT1.

[0561] To identify peptides that are likely to be presented as cell surface antigens by MHC Class I proteins, a sliding window was used to parse each of these proteins into its constituent 8-11 amino acid sequences. These peptides and their flanking sequences were then processed with the HLA peptide presentation deep learning model (see PCT/US2016/067159 and Example 1 above) to calculate the likelihood of presentation of each peptide at an expression level of 100 TPM (high expression) for each of 64 Class I HLA types. Potential modeling artifacts were removed that could give stronger scores to certain HLAs due to training data biases by quantile normalizing model scores for each HLA so that each HLA present scores from the same distribution. In the normalization, the seven target genes as well as 50 randomly selected genes were included to control for HLA allele sequence preferences. A gene was considered likely to be presented if the model normalized score was higher than 0.00075, which was chosen based on the presentation scores of peptides known to be presented in the literature.

[0562] The results are shown in Table A (cont.). Target numbers were assigned to each HLA-PEPTIDE target as described in Example 1.

### Example 4: Validation of Predicted HLA-PEPTIDE Complexes

[0563] The presence of peptides from the HLA-PEPTIDE complexes of Table A were determined using mass spectrometry (MS) on tumor samples known to be positive for each given HLA allele from the respective HLA-PEPTIDE complex.

[0564] Isolation of HLA-peptide molecules was performed using classic immunoprecipitation (IP) methods after lysis and solubilization of the tissue sample (1-4). Fresh frozen tissue was first frozen in liquid nitrogen and pulverized (CryoPrep; Covaris, Woburn, Mass.). Lysis buffer (1% CHAPS, 20 mM Tris-HCl, 150 mM NaCl, protease and phosphatase inhibitors, pH=8) was added to solubilize the tissue and 1/10^{th} of the sample was aliquoted for proteomics and genomic sequencing efforts. The remainder of the sample was spun at 4C for 2 hrs to pellet debris. The clarified lysate was used for the HLA specific IP.

[0565] Immunoprecipitation was performed using antibodies coupled to beads where the antibody was specific for HLA molecules. For a pan-Class I HLA immunoprecipitation, the antibody W6/32 (5) was used, for Class II HLA—DR, antibody L243 (6) was used. Antibody was covalently attached to NHS-sepharose beads during overnight incubation. After covalent attachment, the beads were washed and aliquoted for IP. Additional methods for IP can be used including but not limited to Protein A/G capture of antibody, magnetic bead isolation, or other methods commonly used for immunoprecipitation.

[0566] The lysate was added to the antibody beads and rotated at 4C overnight for the immunoprecipitation. After immunoprecipitation, the beads were removed from the lysate and the lysate was stored for additional experiments, including additional IPs. The IP beads are washed to remove non-specific binding and the HLA/peptide complex was eluted from the beads with 2N acetic acid. The protein components were removed from the peptides using a molecular weight spin column. The resultant peptides were taken to dryness by SpeedVac evaporation and can be stored at −20 C prior to MS analysis.

[0567] Dried peptides were reconstituted in HPLC buffer A and loaded onto a C-18 microcapillary HPLC column for gradient elution in to the mass spectrometer. A gradient of 0-40% B (solvent A—0.1% formic acid, solvent B— 0.1% formic acid in 80% acetonitrile) in 180 minutes was used to elute the peptides into the Fusion Lumos mass spectrometer (Thermo). MS1 spectra of peptide mass/charge (m/z) were collected in the Orbitrap detector with 120,000 resolution followed by 20 MS2 scans. Selection of MS2 ions was performed using data dependent acquisition mode and dynamic exclusion of 30 sec after MS2 selection of an ion. Automatic gain control (AGC) for MS1 scans was set to 4×105 and for MS2 scans was set to 1×104. For sequencing HLA peptides, +1, +2 and +3 charge states can be selected for MS2 fragmentation. This was commonly referred to as Targeted Mass Spectrometry and was performed in either a qualitative manner or can be quantitative. Quantitation methods require each peptide to be quantitated to be synthesized using heavy labeled amino acids. (Doerr 2013)

[0568] MS2 spectra from each analysis were searched against a protein database using Comet (7-8) and the peptide identification was scored using Percolator (9-11) or using the integrated de novo sequencing and database search algorithm of PEAKS.

[0569] The presence of peptides from HLA-PEPTIDE complexes was determined using mass spectrometry (MS) on various tumor samples known to be positive for each given HLA allele from the respective HLA-PEPTIDE complex. Representative spectra data forfor selected HLA-restricted peptides is shown in FIGS. 6 and 7. Each spectra contains the peptide fragmentation information as well as information related to the patient sample, including HLA types.

[0570] The spontaneous modification of amino acids can occur to many amino acids. Cysteine is especially susceptible to this modification and can be oxidized or modified with a free cysteine. Additionally N-terminal glutamine amino acids can be converted to pyro-glutamic acid. Since each of these modifications results in a change in mass, they can be definitively assigned in the MS2 spectra. To use these peptides in preparation of ABPs the peptide may need to contain the same modification as seen in the mass spectrometer. These modifications can be created using simple laboratory and peptide synthesis methods (Lee et al.; Ref 14).

### REFERENCES

[0571] (1) Hunt D F, Henderson R A, Shabanowitz J, Sakaguchi K, Michel H, Sevilir N, Cox A L, Appella E, Engelhard V H. Characterization of peptides bound to the class I MHC molecule HLA-A2.1 by mass spectrometry. Science 1992. 255: 1261-1263.
[0572] (2) Zarling A L, Polefrone J M, Evans A M, Mikesh L M, Shabanowitz J, Lewis S T, Engelhard V H, Hunt D F. Identification of class I MHC-associated phosphopeptides as targets for cancer immunotherapy. Proc Natl Acad Sci USA. 2006 Oct. 3; 103(40):14889-94.
[0573] (3) Bassani-Sternberg M, Pletscher-Frankild S, Jensen L J, Mann M. Mass spectrometry of human leukocyte antigen class I peptidomes reveals strong effects of protein abundance and turnover on antigen presentation. Mol Cell Proteomics. 2015 March; 14(3):658-73. doi: 10.1074/mcp.M114.042812.
[0574] (4) Abelin J G, Trantham P D, Penny S A, Patterson A M, Ward S T, Hildebrand W H, Cobbold M, Bai D L, Shabanowitz J, Hunt D F. Complementary IMAC enrichment methods for HLA-associated phosphopeptide identification by mass spectrometry. Nat Protoc. 2015 September; 10(9):1308-18. doi: 10.1038/nprot.2015.086. Epub 2015 Aug. 6
[0575] (5) Barnstable C J, Bodmer W F, Brown G, Galfre G, Milstein C, Williams A F, Ziegler A. Production of monoclonal antibodies to group A erythrocytes, HLA and other human cell surface antigens-new tools for genetic analysis. Cell. 1978 May; 14(1):9-20.
[0576] (6) Goldman J M, Hibbin J, Kearney L, Orchard K, Th'ng K H. HLA-DR monoclonal antibodies inhibit the proliferation of normal and chronic granulocytic leukaemia myeloid progenitor cells. Br J Haematol. 1982 November; 52(3):411-20.
[0577] (7) Eng J K, Jahan T A, Hoopmann M R. Comet: an open-source MS/MS sequence database search tool. Proteomics. 2013 January; 13(1):22-4. doi: 10.1002/pmic.201200439. Epub 2012 Dec. 4.
[0578] (8) Eng J K, Hoopmann M R, Jahan T A, Egertson J D, Noble W S, MacCoss M J. A deeper look into Comet-implementation and features. J Am Soc Mass Spectrom. 2015 November; 26(11):1865-74. doi: 10.1007/s13361-015-1179-x. Epub 2015 Jun. 27.
[0579] (9) Lukas Käll, Jesse Canterbury, Jason Weston, William Stafford Noble and Michael J. MacCoss. Semi-supervised learning for peptide identification from shotgun proteomics datasets. Nature Methods 4:923-925, November 2007
[0580] (10) Lukas Käll, John D. Storey, Michael J. MacCoss and William Stafford Noble. Assigning confidence measures to peptides identified by tandem mass spectrometry. Journal of Proteome Research, 7(1):29-34, January 2008
[0581] (11) Lukas Käll, John D. Storey and William Stafford Noble. Nonparametric estimation of posterior error probabilities associated with peptides identified by tandem mass spectrometry. Bioinformatics, 24(16):i42-i48, August 2008
[0582] (12) Doerr, A. (2013) Mass Spectrometry-based targeted proteomics. Nature Methods, 10, 23.
[0583] (13) Lindsay K. Pino, Brian C. Searle, James G Bollinger, Brook Nunn, Brendan MacLean & M. J. MacCoss (2017) The Skyline ecosystem: Informatics for quantitative mass spectrometry proteomics. Mass Spectrometry Reviews.
[0584] (14) Lee W Thompson; Kevin T Hogan; Jennifer A Caldwell; Richard A Pierce; Ronald C Hendrickson; Donna H Deacon; Robert E Settlage; Laurence H Brinckerhoff; Victor H Engelhard; Jeffrey Shabanowitz; Donald F Hunt; Craig L Slingluff. Preventing the spontaneous modification of an HLA-A2-restricted peptide at an N-terminal glutamine or an internal cysteine residue enhances peptide antigenicity. Journal of Immunotherapy (Hagerstown, Md.: 1997). 27(3):177-83, May 2004.
[0585] 2017) or other method to analyze predicted fragment ions.

[0586] The presence of multiple peptides from the predicted HLA-PEPTIDE complexes is determined using mass spectrometry (MS) on various tumor samples known to be positive for each given HLA allele from the respective HLA-PEPTIDE complex.

[0587] The spontaneous modification of amino acids can occur to many amino acids. Cysteine is especially susceptible to this modification and can be oxidized or modified with a free cysteine. Additionally N-terminal glutamine amino acids can be converted to pyro-glutamic acid. Since each of these modifications results in a change in mass, they can be definitively assigned in the MS2 spectra. To use these peptides in preparation of ABPs the peptide may need to contain the same modification as seen in the mass spectrometer. These modifications can be created using simple laboratory and peptide synthesis methods (Lee et al.; Ref 14).

### REFERENCES

[0588] (1) Hunt D F, Henderson R A, Shabanowitz J, Sakaguchi K, Michel H, Sevilir N, Cox A L, Appella E, Engelhard V H. Characterization of peptides bound to the class I MHC molecule HLA-A2.1 by mass spectrometry. Science 1992. 255: 1261-1263.
[0589] (2) Zarling A L, Polefrone J M, Evans A M, Mikesh L M, Shabanowitz J, Lewis S T, Engelhard V H, Hunt D F. Identification of class I MHC-associated phosphopeptides as targets for cancer immunotherapy. Proc Natl Acad Sci USA. 2006 Oct. 3; 103(40):14889-94.
[0590] (3) Bassani-Sternberg M, Pletscher-Frankild S, Jensen L J, Mann M. Mass spectrometry of human leukocyte antigen class I peptidomes reveals strong effects of protein abundance and turnover on antigen presentation. Mol Cell Proteomics. 2015 March; 14(3):658-73. doi: 10.1074/mcp.M114.042812.
[0591] (4) Complementary IMAC enrichment methods for HLA-associated phosphopeptide identification by mass spectrometry. 2015 September; 10(9):1308-18. doi: 10.1038/nprot.2015.086. Epub 2015 Aug. 6
[0592] (5) Barnstable C J, Bodmer W F, Brown G, Galfre G, Milstein C, Williams A F, Ziegler A. Production of monoclonal antibodies to group A erythrocytes, HLA and other human cell surface antigens-new tools for genetic analysis. Cell. 1978 May; 14(1):9-20.
[0593] (6) Goldman J M, Hibbin J, Kearney L, Orchard K, Th'ng K H. HLA-D R monoclonal antibodies inhibit the proliferation of normal and chronic granulocytic leukaemia myeloid progenitor cells. Br J Haematol. 1982 November; 52(3):411-20.
[0594] (7) Eng J K, Jahan T A, Hoopmann M R. Comet: an open-source MS/MS sequence database search tool. Proteomics. 2013 January; 13(1):22-4. doi: 10.1002/pmic.201200439. Epub 2012 Dec. 4.
[0595] (8) Eng J K, Hoopmann M R, Jahan T A, Egertson J D, Noble W S, MacCoss M J. A deeper look into Comet-implementation and features. J Am Soc Mass Spectrom. 2015 November; 26(11):1865-74. doi: 10.1007/s13361-015-1179-x. Epub 2015 Jun. 27.
[0596] (9) Lukas Käll, Jesse Canterbury, Jason Weston, William Stafford Noble and Michael J. MacCoss. Nature Methods 4:923-925, November 2007
[0597] (10) Lukas Käll, John D. Storey, Michael J. MacCoss and William Stafford Noble. Journal of Proteome Research, 7(1):29-34, January 2008
[0598] (11) Lukas Käll, John D. Storey and William Stafford Noble. Nonparametric estimation of posterior error probabilities associated with peptides identified by tandem mass spectrometry. Bioinformatics, 24(16):i42-i48, August 2008
[0599] (12) Doerr, A. (2013) Mass Spectrometry-based targeted proteomics. Nature Methods, 10, 23.
[0600] (13) Lindsay K. Pino, Brian C. Searle, James G Bollinger, Brook Nunn, Brendan MacLean & M. J. MacCoss (2017) The Skyline ecosystem: Informatics for quantitative mass spectrometry proteomics. Mass Spectrometry Reviews.
[0601] (14) Lee W Thompson; Kevin T Hogan; Jennifer A Caldwell; Richard A Pierce; Ronald C Hendrickson; Donna H Deacon; Robert E Settlage; Laurence H Brinckerhoff; Victor H Engelhard; Jeffrey Shabanowitz; Donald F Hunt; Craig L Slingluff. Preventing the spontaneous modification of an HLA-A2-restricted peptide at an N-terminal glutamine or an internal cysteine residue enhances peptide antigenicity. Journal of Immunotherapy (Hagerstown, Md.: 1997). 27(3):177-83, May 2004.

### Example 6: Identification of Antibodies or Antigen-Binding Fragments Thereof that Bind HLA-PEPTIDE Complexes

[0602] Overview

[0603] The following exemplification demonstrates that antibodies (Abs) can be identified that recognize tumor-specific HLA-restricted peptides. The overall epitope that is recognized by such Abs generally comprises a composite surface of both the peptide as well as the HLA protein presenting that particular peptide. Abs that recognize HLA complexes in a peptide-specific manner are often referred to as T cell receptor (TCR)-like Abs or TCR-mimetic Abs. The HLA-PEPTIDE target antigens that were selected for antibody discovery are HLA-A*01:01_NTDNNLAVY (Target X in Table A, designated as “G2”) and HLA-A*02:01_LLASSILCA (Target X in Table A, designated as “G7”). Cell surface presentation of these HLA-PEPTIDE antigens was confirmed by mass spectrometry analysis of HLA complexes obtained from tumor samples, as described in Example 4.

[0604] Generation of HLA-PEPTIDE Target Complexes and Counterscreen Peptide-HLA Complexes, and Stability Analysis

[0605] The HLA-PEPTIDE targets G2 and G7, as well as counterscreen negative control peptide-HLAs, were produced recombinantly using conditional ligands for HLA molecules using established methods. In all, 18 counterscreen HLA-peptides were generated for each of the G2 and G7 targets.

[0606] Overall Design of Phage Library Screening

[0607] The highly diverse SuperHuman 2.0 synthetic naïve scFv library from Distributed Bio Inc (7.6e10 total diversity on ultra-stable and diverse VH/VL scaffolds) was used for phage display. The phage library was initially depleted with 18 pooled negative pHLA complexes (the “complete pool”) followed by three to four rounds of bead-based phage panning with the target pHLA complex using established protocols to identify scFv binders to HLA-PEPTIDE targets G2 and G7, respectively. The phage titer was determined at every round of panning to establish removal of non-binding phage. Phage ELISA results are shown in FIGS. 14A and 14B. There was an enrichment of bound phage in later rounds of panning for each of the G2 and G7 targets The output phage supernatant was also tested for target binding by ELISA.

[0608] The design of target screen 1 for the G2 target is shown in FIG. 8. Similarly, the design of target screen 2 for the G7 target is shown in FIG. 11. Briefly, for each target, three “minipool” counterscreen peptides were selected for their ability to bind the same HLA allele as the target and also to have significantly different ABP-facing features such as charge, bulk, aromatic, or hydrophobic residues. See FIG. 9A for G2 and FIG. 13A for G7. In addition, additional counterscreen peptide-HLA complexes, featuring distinct restricted peptide sequences and different HLA alleles were generated. The 15 additional counterscreen HLA-peptides plus the three “minipool” HLA-peptides formed a “complete pool” of 18 total counterscreen HLA-peptide complexes.

[0609] Generation of Peptide-HLA Complexes

[0610] α-, and β2 microglobulin chain of various human leukocyte antigens (HLA) were expressed separately in BL21 competent E. coli cells (New England Biolabs) using established procedures (Garboczi, Hung, & Wiley, 1992). Following auto-induction, cells were lysed via sonication in Bugbuster® plus benzonase protein extraction reagent (Novagen). The resulting inclusion bodies were washed and sonicated in wash buffer with and without 0.5% Triton X-100 (50 mM Tris, 100 mM NaCl, 1 mM EDTA). After the final centrifugation, inclusion pellets were dissolved in urea solution (8 M urea, 25 mM MES, 10 mM EDTA, 0.1 mM DTT, pH 6.0). Bradford assay (Biorad) was used to quantify the concentration and the inclusion bodies were stored at −80° C.

[0611] HLA complexes were obtained by refolding of recombinantly produced subunits and a synthetically obtained peptide using established procedures. (Garboczi et al., 1992). Briefly, the purified α and β2 microglobulin chains were refolded in refold buffer (100 mM Tris pH 8.0, 400 mM L-Arginine HCl, 2 mM EDTA, 50 mM oxidized glutathione, 5 mM reduced glutathione, protease inhibitor tablet) with the restricted peptide of choice. In some experiments, the restricted peptide of choice was a conditional ligand peptide, which is cleavable upon exposure to a conditional stimulus. In some experiments, the restricted peptide of choice was the G2 or G7 target peptide, or counterscreen peptide. The refold solution was concentrated with a Vivaflow 50 or 50R crossflow cassette (Sartorius Stedim). Three rounds of dialyses in 20 mM Tris pH 8.0 were performed for at least 8 hours each. For the antibody screening and functional assays, the refolded HLA was enzymatically biotinylated using BirA biotin ligase (Avidity). Refolded protein complexes were purified using a HiPrep (16/60 Sephacryl S200) size exclusion column attached to an Akta FPLC system. Biotinylation was confirmed in a streptavidin gel-shift assay under non-reducing conditions by incubating the refolded protein with an excess of streptavidin at room temperature for 15 minutes prior to SDS-PAGE. The resulting peptide-HLA complexes were aliquoted and stored at −80° C.

[0612] Stability Analysis of the Peptide-HLA Complexes

[0613] HLA-peptide stability was assessed by conditional ligand peptide exchange and stability ELISA assay. Briefly, conditional ligand-HLA complexes were subjected to ±conditional stimulus in the presence or absence of the counterscreen or test peptides. Exposure to the conditional stimulus cleaves the conditional ligand from the HLA complex, resulting in dissociation of the HLA complex. If the counterscreen or test peptide stably binds the α1/α2 groove of the HLA complex, it “rescues” the HLA complex from disassociation.

[0614] The HLA stability ELISA was performed using established procedures. (Chew et al., 2011; Rodenko et al., 2006) A 384-well clear flat bottom polystyrene microplate (Corning) was precoated with 50 μl of streptavidin (Invitrogen) at 2 μg mL⁻¹ in PBS. Following 2 h of incubation at 37° C., the wells were washed with 0.05% Tween 20 in PBS (four times, 50 μL) wash buffer, treated with 50 μl of blocking buffer (2% BSA in PBS), and incubated 30 min at room temperature. Subsequently, 25 μl of peptide-exchanged samples that were 300× diluted with 20 mM Tris HCl/50 mM NaCl were added in quadruplicate. The samples were incubated for 15 min at RT, washed with 0.05% Tween wash buffer (4×50 μL), treated for 15 min with 25 μL of HRP-conjugated anti-β2m (1 μg mL⁻¹ in PBS) at RT, washed with 0.05% Tween wash buffer (4×50 μL), and developed for 10-15 min with 25 μL of ABTS-solution (Invitrogen), and the reactions were stopped by the addition of 12.5 μL of stop buffer (0.01% sodium azide in 0.1 M citric acid). Absorbance was subsequently measured at 415 nm using a spectrophotometer (SpectraMax i3x; Molecular Devices).

[0615] Results for the G2 counterscreen “minipool” and G2 target are shown in FIG. 9B. All three counterscreen peptides and the G2 peptide rescued the HLA complex from dissociation.

[0616] Results for the additional G2 “complete” pool counterscreen peptides are shown in FIG. 10, demonstrating that they also form stable HLA-peptide complexes.

[0617] Results for the G7 counterscreen “minipool” and G7 target are shown in FIG. 13B. All three counterscreen peptides and the G7 peptide rescued the HLA complex from dissociation.

[0618] Results for the additional G7 “complete” pool counterscreen peptides are shown in FIG. 12, demonstrating that they also form stable HLA-peptide complexes.

[0619] Phage Library Screening

[0620] Phage library screening was carried out according to the overall screening design described above. Three to four rounds of bead-based panning were performed to identify scFv binders to each peptide-HLA complex. For each round of panning, an aliquot of starting phage was set aside for input titering and the remaining phage was depleted three times against Dynabead M-280 streptavidin beads (Life Technologies) followed by a depletion against Streptavidin beads pre-bound with 100 pmoles of pooled negative peptide-HLA complexes. For the first round of panning, 100 pmoles of peptide-HLA complex bound to streptavidin beads was incubated with depleted phage for 2 hours at room temperature with rotation. Three five-minute washes with 0.5% BSA in 1×PBST (PBS+0.05% Tween-20) followed by three five-minute washes with 0.5% BSA in 1×PBS were utilized to remove any unbound phage to the peptide-HLA complex bound beads. To elute the bound phage from the washed beads, 1 ml 0.1M TEA was added and incubated for 10 minutes at room temperature with rotation. The eluted phage was collected from the beads and neutralized with 0.5 ml 1M Tris-HCl pH 7.5. The neutralized phage was then used to infect log growth TG-1 cells (OD₆₀₀=0.5) and after an hour of infection at 37° C., cells were plated onto 2YT media with 100 μg/ml carbenicillin and 2% glucose (2YTCG) agar plates for output titer and bacterial growth for subsequent panning rounds. For subsequent rounds of panning, selection antigen concentrations were lowered while washes increased by amount and length of wash times at show in Table 1.

TABLE 1
Phage library screening strategy

| Round | Antigen concentration | Washes |
|---|---|---|
| R1 | 100 pmol | 3x PBST + 3x |
| | | PBS (5 min washes) |
| R2 | 25 pmol | 5 PBST (2x 30 sec, 3x 5 min) + |
| | | 5 PBS (2x 30 sec, 3x 5 |
| | | min) |
| R3 | 10 pmol | 8 PBST (4x 30 sec, 4x 5 min) + |
| | | 8 PBS (4x 30 sec, 4x 5 |
| | | min) |
| R4 | 5 pmol, 10 pmol | 30 min PBST + |
| | | 30 min PBS |

[0621] Individual scFvs were cloned from phage and sequenced by DNA Sanger sequencing (“Sequence Unique Binders”). The individual scFvs were also expressed in E. coli and periplasmic extracts (PPE) from E. coli containing the individual crude scFvs were subjected to scFv ELISA

[0622] scFv Periplasmic Extract (PPE) ELISA

[0623] The individual scFv cloned from phage obtained in the final round of panning, and expressed in E. coli, was subjected to scFv PPE ELISA as follows.

[0624] 96-well and/or 384-well streptavidin coated plates (Pierce) were coated with 2 ug/ml peptide-HLA complex in HLA buffer and incubated overnight at 4° C. Plates were washed three times between each step with PBST (PBS+0.05%). The antigen coated plates were blocked with 3% BSA in PBS (blocking buffer) for 1 hour at room temperature. After washing, scFv PPEs were added to the plates and incubated at room temperature for 1 hour. Following washing, mouse anti-v5 antibody (Invitrogen) in blocking buffer was added to detect scFv and incubated at room temperature for 1 hour. After washing, HRP-goat anti-mouse antibody (Jackson ImmunoResearch) was added and incubated at room temperature for 1 hour. The plates were then washed three times with PBST and 3 times with PBS before HRP activity was detected with TMB 1-component Microwell Peroxidase Substrate (Seracare) and neutralized with 2N sulfuric acid.

[0625] For negative peptide-HLA complex counter-screening, scFv PPE ELISAs were performed as described above, except for the coating antigen. HLA mini-pools consisted of 2 ug/ml of each of the three negative peptide-HLA complexes pooled together and coated onto streptavidin plates for comparison binding to their particular peptide-HLA complex. HLA big pools consisted of 2 ug/ml of each of all 18 negative peptide-HLA complexes pooled together and coated onto streptavidin plates for comparison binding to their particular peptide-HLA complex.

[0626] Those scFvs that showed selectivity for target pHLA compared to negative control pHLA by scFv-ELISA as crude PPE, were separately expressed and purified. The purified scFvs were titratated by scFv ELISA for confirmation of binding only target pHLA compared to negative control pHLA (“Selective Binders”).

[0627] Clones were formatted into IgG, Fab, or scFv for further biochemical and functional analysis. ScFv clones selected for Fab production to be used for crystallization with their corresponding pHLA complexes were selected based on several parameters: sequence diversity, binding affinity, selectivity, and CDR3 diversity. The clustal software was used to produce a dendrogram and assess the sequence diversity of the Fab clones. The canonical 3D structures of the scFv sequences, based on the VH type, were also considered when possible. Binding affinity, as determined by the equilibrium dissociation constant (KD), was measured using an Octet HTX (ForteBio). Selectivity for the specific peptide-HLA complexes was determined with an ELISA titration of the purified scFvs and compared to negative peptides or streptavidin alone. Cutoff values for the KD and selectivity were determined for each target set based on the range of values obtained for the Fabs within each set. Final clones were then selected to obtain the highest diversity in sequence families and CDR3.

[0628] Table 2 shows the hit rate for the screening campaign described above.

TABLE 2
hit rate for screening campaigns

| Group | G2 | G7 |
|---|---|---|
| Gene target | CT83 | CT83 |
| HLA | A*01:01 | A*02:01 |
| Restricted peptide | NTDNNLAVY | LLASSILCA |
| # Sequence Unique Binders | 74 | 8 |
| # Selective Binders | 27 | 6 |
| # selected for IgG | 20 | 8 |
| # selected for Fab | 6 | 3 |
| # selected for scFv | 20 | 7 |

[0629] Table 3 shows the VH and VL sequences of the G2 scFv Selective Binders, selective for HLA-PEPTIDE Target HLA-A*01:01_NTDNNLAVY

[0630] Table 4 shows the CDR sequences for the G2 Selective Binders, selective for HLA-PEPTIDE Target HLA-A*01:01_NTDNNLAVY. CDRs were determined according to the Kabat numbering system.

[0631] Table 5 shows the VH and VL sequences of the G7 scFv Selective Binders, selective for HLA-PEPTIDE Target HLA-A*02:01_LLASSILCA.

[0632] Table 6 shows the CDR sequences for the G7 Selective Binders, selective for HLA-PEPTIDE Target HLA-A*02:01_LLASSILCA. CDRs were determined according to the Kabat numbering system.

### Example 7: Reformatting of Antibodies into Fab/scFv/IgG Clones

[0633] Selected clones were reformatted into Fab, scFv, or IgG formats as follows.

[0634] Construction and Production of Fab Protein Fragments

[0635] The constructs of selected G2, and G7 Fabs were cloned into a vector optimized for mammalian expression. Each DNA construct was scaled up for transfection and sequences were confirmed. A 100 mL transient production was completed in HEK293 cells (Tuna293™ Process) for each. The proteins were purified by anti-CH1 purification subsequently purified by SEC-polishing via HiLoad 16/600 Superdex 200. The mobile phase used for SEC-polishing was 20 mM Tris, 50 mM NaCl, pH 7. Final confirmatory CE-SDS analysis was performed.

[0636] Construction and Production of scFv Protein Fragments

[0637] The expression plasmid was transformed into BL21(DE3) strain and co-expressed with a periplasmid chaperone in a 400 mL E. coli culture. The cell pellet was reconstituted: 10 ml/1 g biomass with (25 mM HEPES, pH7.4, 0.3M NaCl, 10 mM MgCl2, 10% glycerol, 0.75% CHAPS, 1 mM DTT) plus lysozyme, and benzonase and Lake Pharma protease inhibitor cocktail. The cell suspension was incubated on a shaking platform at RT for 30 minutes. Lysates were clarified by centrifugation at 4C, 13,000×rpm for 15 min. The clarified lysate was loaded onto 5 ml of Ni NTA resin pre-equilibrated in IMAC Buffer A (20 mM Tris-HCl, Ph7.5; 300 mM NaCl/10% Glycerol/1 mM DTT). The resin was washed with 10CVs of Buffer A (or until a stable baseline was reached), followed by 10 CVs of 8% IMAC Buffer B (20 mM Tris-HCl, Ph7.5; 300 mM NaCl/10% Glycerol/1 mM DTT/250 mM Imidazole). The target protein was eluted in a 20CV gradient to 100% IMAC Buffer B. The column was washed with 5CVs of 100% IMAC B to ensure complete protein removal. Elution fractions were analyzed by SDS-PAGE and Western blot (anti-His) and pooled accordingly. The pool was dialyzed to versus final formulation buffer (20 mM Tris-HCl, Ph7.5; 300 mM NaCl/10% glycerol/1 mM DTT), concentrated to a final protein concentration >0.3 mg/ml, aliquoted into 1 mL vials, and flash frozen in liquid nitrogen. Final QC steps included SDS-PAGE and measuring A280.

[0638] Construction and Production of IgG Proteins

[0639] The expression constructs of the G series antibodies were cloned into a vector optimized for mammalian expression. Each DNA construct was scaled up for transfection and sequences were confirmed. A 10 mL transient production was completed in HEK293 cells (Tuna293™ Process) for each. The proteins were purified by Protein A purification and final CE-SDS analysis was performed.

### Example 8: Affinity of Fab Clones for the HLA-PEPTIDE Target

[0640] Affinity measurements were performed on the Octet Qke (ForteBio). Biotinylated pHLA complexes in 1× kinetics buffer were loaded onto streptavidin sensors at concentrations that gave the optimal nm shift response (approximately 0.6 nm) for each Fab at the highest concentration used. The pHLA complexes were loaded for 300 seconds and the ligand-loaded tips were subsequently equilibrated in the kinetics buffer for 120 seconds. The ligand-loaded biosensors were then dipped for 200 seconds in the Fab solution titrated into 2-fold dilutions. Starting Fab concentrations ranged from 100 nM to 2 uM, then optimized based on the K_{D} values of the Fab. The dissociation step in the kinetics buffer was measured for 200 seconds. Data was analyzed using the ForteBio data analysis software using a 1:1 binding model.

[0641] FIGS. 15A and 15B show BLI results for G2 target Fab clone G-2P1H11 and for G7 target Fab clone G7R4-B5-P2E9, respectively.

[0642] Results are shown in the Table below.

TABLE 7
Optimized Octet BLI affinity measurements of Fabs
binding to their target peptide-HLA complex

| Target | Fab clone | KD (M) | Kon (1/Ms) | Kdis (1/s) | Full R\hat{ }2 |
|---|---|---|---|---|---|
| G2 | G2-P1B06 | 4.44E−08 | 1.06E+06 | 3.23E−02 | 0.991 |
| G2 | G2-P2A03 | 1.09E−07 | 3.32E+05 | 3.60E−02 | 0.998 |
| G2 | G2-P1B12 | 2.28E−08 | 3.66E+05 | 7.28E−03 | 0.980 |
| G2 | G2-P2A11 | 2.81E−08 | 6.33E+05 | 1.72E−02 | 0.992 |
| G2 | G2-P1H01 | 1.55E−08 | 9.52E+05 | 1.48E−02 | 0.984 |
| G2 | G2-P1H11 | 4.99E−08 | 5.81E+05 | 2.80E−02 | 0.994 |
| G7 | 2-G7R4-P2C2 | 5.31E−07 | 1.04E+05 | 5.43E−02 | 0.986 |
| G7 | 3-G7R4-P1A3 | 5.32E−07 | 1.97E+05 | 9.94E−02 | 0.988 |
| G7 | 4-G7R4-B5- | 1.18E−08 | 1.85E+05 | 2.12E−03 | 0.992 |
| | P2E9 | | | | |

### Example 9: Positional Scanning of G2 and G7 Restricted Peptide Sequences

[0643] Positional scanning of the G2 and G7 restricted peptides was carried out to determine the amino acid residues which act as contact points for selected Fab clones.

[0644] Briefly, positional scanning libraries of variant G2 and G7 restricted peptides were generated with amino acid substitutions at a single position in the G2 or G7 peptide sequence, scanning across all positions. The amino acid substitutions at a given position were either alanine (conservative substitution), arginine (positively charged), or aspartate (negatively charged). A map of the amino acid substitutions for the positional scanning experiment is shown in FIG. 16. Asterisks denote lack of amino acid substitution.

[0645] Peptide-HLA complexes comprising the positional scanning library members and the HLA subtype allele were generated as described in Example 6. To determine whether the variant G2 and G7 peptides could complex with the desired HLA alleles, stability analyses of the resulting complexes were carried out using conditional ligand peptide exchange and ELISA as described in Example 6. Next, binding affinity of the positional variant-HLA complexes to the Fab clones was assessed by BLI, as described in Example 8.

[0646] A stability heat map for the G2 positional variant-HLAs is shown in FIG. 17A. [Red] denotes very low stability, [gray] denotes low stability, and [blue] denotes high stability. FIG. 17A shows that the C-terminal amino acid residue (position 9) and the second and third N-terminal residues (positions 2 and 3) were critical residues for anchoring the peptide to the HLA thereby stabilizing the ternary complex.

[0647] An affinity heat map for Fab clone G2-P1H11 is shown in FIG. 17B. The degree of binding indicated on the heatmap is based on the nm shift on the BLI biosensor due to Fab binding to the pHLA. As stated above, [Red] denotes no binding affinity (−0.02 to 0.18 nm shift), [gray] denotes weak binding affinity (0.19-0.25 nm shift), and [blue] denotes high binding affinity (0.26-0.32 nm shift). As expected, positional mutations which resulted in unstable complexes (at positions 2, 3, and 9) also resulted in no Fab binding. FIG. 17B shows that introduced substitutions at positions 3-8 resulted in failure of the Fab clone to bind the HLA-peptide complex. These results suggest that the majority of the residues which are not involved in binding the HLA molecule, and are residues that likely protrude from the HLA protein, are important for peptide-specificity of Fab clone G2-P1H11.

[0648] A stability heat map for the G7 positional variants is shown in FIG. 18A. Positions 1, 2, 6, and 9 appear to be important for stabilizing the HLA complex.

[0649] An affinity heat map for Fab clone G7R4-B5-P2E9 is shown in FIG. 18B. As stated above, [Red] denotes no binding affinity (−0.02 to 0.18 nm shift), [gray] denotes weak binding affinity (0.19-0.25 nm shift), and [blue] denotes high binding affinity (0.26-0.72 nm shift). indicating that positions 1-5 are important for peptide-specificity of the Fab clone.

### Example 10: Generated Antibodies Successfully Bind Cells Presenting the HLA-PEPTIDE Target

[0650] IgGs from scFv clones G2-P1H11 and G7-Ep were created as described in Example 7.

[0651] The ability of IgGs to bind to K562 cells pulsed with the target restricted peptide was assessed by flow cytometry.

[0652] Retroviral Production

[0653] Phoenix-AMPHO cells (ATCC®, CRL-3213™) were plated at 5×10⁵ cells/well in a 6 well plate and incubated overnight at 37° C.

[0654] Phoenix-AMPHO cells were transfected with retroviral vectors containing expression cassettes for the desired HLA subtypes as follows. 10 g plasmid, 10 μL Lipofectamine LTX PLUS (Fisher Scientific, cat #15338100) reagent and 100 μL Opti-MEM (Gibco™, cat #31985062) were incubated at room temperature for 15 minutes. Simultaneously, 8 μL Lipofectamine was incubated with 92 μL Opti-MEM at room temperature for 15 minutes. These two reactions were combined and incubated again for 15 minutes at room temperature after which 800 μL Opti-MEM was added. The culture media was aspirated from the Phoenix cells and they were washed with 5 mL pre-warmed Opti-MEM. The Opti-MEM was aspirated from the cells and the lipofectamine mixture was added. The cells were incubated for 3 hours at 37° C. and 3 mL complete culture medium was added. The plate was then incubated overnight at 37° C. The media was replaced with Phoenix culture medium and the plate incubated an additional 2 days at 37° C.

[0655] The media was collected and filtered through a 45 μm filter into a clean 6 well dish. 20 μL Plus reagent was added to each virus suspension and incubated at room temperature for 15 minutes followed by the addition of 8 μL/well of Lipofectamine and another 15 minute room temperature incubation.

[0656] Generation of K562 Cells Expressing the HLA-PEPTIDE Targets and Cell Binding with Exemplary IgG Clones

[0657] K562 cells, which lack endogenous MHC, were transduced with retrovirus for introduction of the HLA subtype for G2 or G7, respectively. HLA-transduced K562 cells were pulsed the night before with 50 μM of target or negative control peptide (Genscript) in IDMEM containing 1% FBS in 6 well plates and incubated under standard tissue culture conditions. Cells were harvested, washed in PBS, and stained with eBioscience Fixable Viability Dye eFluor 450 for 15 minutes at room temperature. Following another wash in PBS+1% FBS, cells were resuspended with test IgGs (G2-P1H11 or G7R4-B5-P2E9) at varying concentrations. Cells were incubated with the antibodies for 1 hour at 4° C. After another wash, PE-congugated goat anti-human IgG secondary antibody (Jackson ImmunoResearch) was added at 1:200 for 30 minutes at 4° C. After washing in PBS+1% FBS, cells were resuspended in PBS+1% FBS and analyzed by flow cytometry. Flow cytometric analysis was performed on the Attune NxT Flow Cytometer (ThermoFisher) using the Attune NxT Software. Data was analyzed using FlowJo.

[0658] Results are shown in FIGS. 19 and 20. Both G2-P1H11 and G7R4-B5-P2E9 selectively bound HLA-transduced K562 cells pulsed with the target peptide, as compared to HLA-transduced cells pulsed with the negative control peptides.

[0659] In Vivo Proof-of-Concept

[0660] Lead antibody or CAR-T constructs are evaluated in vivo to demonstrate directed tumor killing in humanized mouse tumor models. Lead antibody or CAR-T constructs are evaluated in xenograft tumor models engrafted with human tumors and PBMCs. Anti-tumor activity is measured and compared to control constructs to demonstrate target-specific tumor killing.

### Example 11: scFv-pHLA Structures by Hydrogen/Deuterium Exchange and Mass Spectrometry

[0661] Hydrogen/Deuterium Exchange

[0662] 20 μM of HLA-peptide was incubated with a 3-fold molar excess of scFv or Fab formatted ABPs for 20 min at room temperature (20-25° C.) to generate complexes for the exchange experiments. For the Apo control, the HLA-peptide was incubated with an equal volume of 50 mM NaCl, 20 mM Tris pH 8.0, without the ABP. All subsequent reaction steps were performed at 4° C. by an automated HDX PAL system controlled by Chronos 4.8.0 software (Leap Technologies, Morrisville, N.C.). Deuterium exchange was carried out in duplicate for time periods ranging from 30 s to 3 hrs. 5 μl of protein complexes were diluted 10-fold into H2O (for the 0 min. control time-point) or D20 for the indicated time-points prior to quenching in 0.8 M guanidine hydrochloride, 0.4% acetic acid (v/v), and 75 mM tris(2-carboxyethyl) phosphine for 3 min.˜50 pmol of quenched protein complexes were transferred onto an immobilized Protein XIII/Pepsin column (NovaBioAssays, Woburn, Mass.) for integrated on-line protein digestion.

[0663] Liquid Chromatography, Mass Spectrometry, and HDX Analysis

[0664] Chromatographic separation of peptides was carried out using an UltiMate 3000 Basic Manual UHPLC System (ThermoFisher Scientific, Waltham, Mass.), which contained a trap C18 column (5 μM particle size and 2.1 mm diameter) and an analytical C18 column (1.9 μM particle size and 1 mm diameter). Samples were desalted with 10% acetonitrile, 0.5% formic acid at a 40 μl/min flow rate for 2 min and peptides were eluted at a 40 μl/min flow rate with an increasing concentration of 95% acetonitrile, 0.5% formic acid. Mass spectrometry was performed with an Orbitrap Fusion Lumos mass spectrometer (ThermoFisher, Waltham, Mass.) with the ESI source set at a positive ion voltage of 3700 V. Prior to performing hydrogen-deuterium exchange experiments, peptide fragments of each HLA-peptide complex were analyzed by data-dependent LC/MS/MS and the data searched using PEAKS Studio (Bioinformatics Solutions Inc., Waterloo, ON, Canada) with a peptide precursor mass tolerance of 10 ppm and fragment ion mass tolerance of 0.1 Da. The sequences of the HLA, β2M, and the peptide were searched, and false detection rates identified using a decoy-database strategy. Peptides from the hydrogen-deuterium experiments were detected by LC/MS and analyzed by HDX Workbench (Omics Informatics, Honolulu, Hi.) with a retention time window size of 0.22 min and a 7.0 ppm error. In the deuterium (D) exchange samples the peptide was then identified in the elution time window and the difference in mass was determined. Mass increases by 1 for each D exchanged in the peptide backbone since D has a molecular weight of 1 more than H. The difference in mass and the intensity of the isotopic ions produced values of % D for each peptide. Differences in deuterium uptake were mapped to relevant protein crystallographic structures using Pymol (Schrödinger, Cambridge, Mass.). The decrease in D exchange between the Apo control and ABP was calculated and plotted by amino acid. Statistical analysis and graphical representations were performed using GraphPad Prism 7.0 (La Jolla, Calif.).

[0665] An example of the data from scFv G2-P1G07 plotted on a crystal structure PDB 5bs0 is shown in FIG. 21. The crystal structure can be found at URL https://www.rcsb.org/structure/5bs0 (Raman et al). Areas not covered with MS data are shown in black and those with the greatest decrease in D exchange (indicating a binding site for the ABP) is circled. For clarity, only the binding groove and helices are shown.

[0666] An exemplary heatmap for scFv clone G2-P1G07 visualized in its entirety using a consolidated perturbation view is shown in FIG. 22.

[0667] To better compare the data across the ABPs tested for a given HLA-PEPTIDE target, data for each ABP was exported, and a heat map was generated in Excel. Resulting heat maps are shown in FIG. 23 showing a heat map across the al helix (top) and across the α2 helix (bottom). FIG. 24 shows a heat map for all ABPs tested for A*0101_NTDNNLAVY, across restricted peptide residues 1-9. These results indicate that residues 6-9 of the restricted peptide, and HLA residues 157-160 are important contact points of the A*0101_NTDNNLAVY HLA-PEPTIDE target complex for binding to its specific ABP. All clone entries in the HDX heat maps are scFv formats unless otherwise noted.

### Example 12: Isolation of TCRs that Specifically Bind HLA-PEPTIDE Targets

[0668] FIG. 25 depicts an experimental workflow by which TCRs which specifically bind HLA-PEPTIDE targets were isolated. Briefly, naïve CD8+ T cells that bind to the HLA-PEPTIDE target were isolated by flow cytometry and polyclonally expanded. Following expansion, specificity of cells for HLA-PEPTIDE target complex was tested by flow cytometry. If a large fraction (>75%) of an expanded population was specific for the HLA-PEPTIDE target, the population as a whole was sequenced as a whole to identify TCRs. Alternatively, cells that specifically bound the HLA-PEPTIDE target were resorted, and only cells isolated after resort were sequenced. TCR sequences were cloned into expression vectors and introduced into recipient T cells as recombinant TCRs. Expression of the evaluated TCR and binding of cognate HLA-PEPTIDE target complex by the TCR-recombinant T cells was assessed.

[0669] Identified HLA-PEPTIDE Targets were Readily Recognized by CD8+ T Cells

[0670] Peripheral Blood Mononuclear Cells (PBMCs) from healthy donors were magnetically enriched for naïve CD8+ T cells as follows. PBMCs were obtained by processing leukapheresis samples from healthy donors. Frozen PBMCs were thawed and incubated with cocktail of biotinylated CD45RO, CD14, CD15, CD16, CD19, CD25, CD34, CD36, CD57, CD123, anti-HLA-DR, CD235a (Glycophorin A), CD244, and CD4 antibodies and were subsequently magnetically labeled with anti-biotin microbeads for removal from PBMC population. Enriched naïve CD8 T cells were labelled with tetramers comprising of target peptide and appropriate HLA molecule, stained with live/dead and lineage markers and sorted by flow cytometry according to the gating procedure depicted in FIG. 26. Cells that bound the HLA-PEPTIDE tetramers were isolated. Following polyclonal expansion, specificity of expanded CD8+ T cells was reassessed by labeling with the HLA-PEPTIDE or no tetramer control. Flow cytometry results for exemplary HLA-PEPTIDE targets B*44:02 GEMSSNSTAL and A*01:01 EVDPIGHLY are shown in FIG. 27. Flow cytometry results for the HLA-PETPIDE target A*03:01_GVHGGILNK is shown in FIG. 28.

[0671] The number of isolated CD8+ T cells per HLA-PEPTIDE target per donor and distribution of isolated CD8+ T cells frequency per HLA-PEPTIDE target across all donors tested is shown in FIG. 29: 29A (number of isolated CD8+ T cells) and 29B (frequency). Total number of isolated naïve CD8+ T cells per target ranged from 23-4181 antigen specific cells, which is in line with precursor frequencies of T cells specific for known immunogenic viral antigens. These cells present the source of natural TCRs for sequencing and further characterization.

[0672] The number of isolated target-specific T cells per target summarized across all tested donors is shown in Table 8.

TABLE 8
number of isolated target-specific T cells
per target summarized across all donors

| | | Cumulative Number |
|---|---|---|
| | | of TCR Source |
| Target | Gene | Cells Per Target |
| EVDPIGHLY | | |
| (HLA-A*0101) | MAGEA3 | 5242 |
| EVDPIGHVY | | |
| (HLA-A*0101 | MAGEA6 | 1296 |
| GEMSSNSTAL | | |
| (HLA-B*4402) | CT 83 | 48 |
| GVHGGILNK | | |
| (HLA-A*0301) | PFN3 | 219 |
| GVYDGEEHSV | | |
| (HLA-A*0201) | MAGEB2 | 17 |
| LLASSILCA | | |
| (HLA-A*0201) | CT 83 | 1665 |
| LVIDTVTEV | | |
| (HLA-A*0201) | SPERT | 16 |
| NTDNNLAVY | | |
| (HLA-A*0101) | CT 83 | 575 |

[0673] These data demonstrate that identified HLA-PEPTIDE targets are biologically relevant, as natural CD8+ T cells exist in HLA matched human blood which bind/recognize target peptides in the context of predicted associated MHC molecule.

[0674] CD8+ T Cells Yielded a Diverse Repertoire of Unique TCRs which Bound the HLA-PEPTIDE Targets

[0675] Criteria for Sequencing of T-Cells

[0676] If a large fraction (>75%) of an expanded population was specific for the HLA-PEPTIDE target, the population as a whole was sequenced as a whole to identify TCRs. Then, selected TCR sequences from the population were cloned into expression vectors and transfected into recipient T-cells for confirmation of specificity. Alternatively, cells that specifically bound the HLA-PEPTIDE target were resorted, and only cells isolated after resort were sequenced.

[0677] Sequencing Protocol

[0678] T cells isolated and expanded as described in FIG. 26 were sequenced using 10× Genomics single cell resolution paired immune TCR profiling approach. Specifically, two-to-eight thousand live T cells were partitioned into single cell emulsions for subsequent single cell cDNA generation and full-length TCR profiling (5′ UTR through constant region ensuring alpha and beta pairing). One approach utilizes a molecularly barcoded template switching oligo at the 5′end of the transcript, a second approach utilizes a molecularly barcoded constant region oligo at the 3′ end, and a third approach couples an RNA polymerase promoter to either the 5′ or 3′ end of a TCR. All of these approaches enable the identification and deconvolution of alpha and beta TCR pairs at the single-cell level. The resulting barcoded cDNA transcripts underwent an optimized enzymatic and library construction workflow to reduce bias and ensure accurate representation of clonotypes within the pool of cells. Libraries were sequenced on Illumina's MiSeq or HiSeq4000 instruments (paired-end 150 cycles) for a target sequencing depth of about five to fifty thousand reads per cell.

[0679] Sequencing reads were processed through the 10× provided software Cell Ranger. Sequencing reads were tagged with a Chromium cellular barcodes and UMIs, which were used to assemble the V(D)J transcripts cell by cell. The assembled contigs for each cell were then annotated by mapping the assembled contigs to V(D)J reference sequences from Ensembl version 87 (http://www.ensembl.org/).

[0680] Clonotypes were defined as alpha, beta chain pairs of unique CDR3 amino acid sequences. Clonotypes were filtered for single alpha and single beta chain pairs present at frequency above 2 cells to yield the final list of clonotypes per target peptide in a specific donor. FIG. 30A depicts the number of unique TCR clonotypes per HLA-PEPTIDE target for each tested donor. FIG. 30B depicts the total number of unique clonotypes per HLA-PEPTIDE target, summed across all donors tested.

[0681] TCR Sequences of Unique Clonotypes from Resorted Cells

[0682] Annotated variable, diversity, joining, and constant regions of TCR clonotypes specific for A*0101_EVDPHIGHLY, from resorted cells, are shown below in Table 9.

TABLE 9
annotated TCR sequences of unique TCRs specific for
A*0101_EVDPHIGHLY, sequenced from resorted cells

| TCR ID # | PEPTIDE | HLA | TRW | TRAJ | TRAC | TRBV | TRBD | TRBJ | TRBC |
|---|---|---|---|---|---|---|---|---|---|
| TCR101 | EVDPIGHLY | A0101 | TRAV12-3 | TRAJ20 | TRAC | TRBV20-1 | TRBD2 | TRBJ1-2 | TRBC1 |
| TCR102 | EVDPIGHLY | A0101 | TRAV19 | TRAJ40 | TRAC | TRBV20-1 | TRBD1 | TRBJ2-7 | TRBC2 |
| TCR103 | EVDPIGHLY | A0101 | TRAV21 | TRAJ4 | TRAC | TRBV10-3 | None | TRBJ1-1 | TRBC1 |
| TCR104 | EVDPIGHLY | A0101 | TRAV12-3 | TRAJ20 | TRAC | TRBV20-1 | TRBD1 | TRBJ2-7 | TRBC2 |
| TCR105 | EVDPIGHLY | A0101 | TRAV1-1 | TRAJ4 | TRAC | TRBV9 | TRBD1 | TRBJ1-1 | TRBC1 |
| TCR106 | EVDPIGHLY | A0101 | TRAV12-1 | TRAJ17 | TRAC | TRBV6-1 | TRBD2 | TRBJ2-1 | TRBC2 |
| TCR107 | EVDPIGHLY | A0101 | TRAV4 | TRAJ47 | TRAC | TRBV20-1 | TRBD2 | TRBJ2-3 | TRBC2 |
| TCR108 | EVDPIGHLY | A0101 | TRAV21 | TRAJ6 | TRAC | TRBV5-4 | None | TRBJ2-1 | TRBC1 |
| TCR109 | EVDPIGHLY | A0101 | TRAV12-1 | TRAJ11 | TRAC | TRBV11-3 | TRBD1 | TRBJ1-1 | TRBC1 |
| TCR110 | EVDPIGHLY | A0101 | TRAV21 | TRAJ31 | TRAC | TRBV5-1 | TRBD1 | TRBJ1-1 | TRBC1 |
| TCR111 | EVDPIGHLY | A0101 | TRAV21 | TRAJ33 | TRAC | TRBV5-1 | TRBD1 | TRBJ2-3 | TRBC2 |
| TCR112 | EVDPIGHLY | A0101 | TRAV34 | TRAJ40 | TRAC | TRBV9 | TRBD2 | TRBJ2-7 | TRBC2 |
| TCR113 | EVDPIGHLY | A0101 | TRAV29DV5 | TRAJ29 | TRAC | TRBV7-9 | TRBD1 | TRBJ2-3 | TRBC2 |
| TCR114 | EVDPIGHLY | A0101 | TRAV19 | TRAJ40 | TRAC | TRBV20-1 | TRBD2 | TRBJ1-2 | TRBC1 |
| TCR115 | EVDPIGHLY | A0101 | TRAV4 | TRAJ47 | TRAC | TRBV20-1 | TRBD1 | TRBJ2-7 | TRBC2 |
| TCR116 | EVDPIGHLY | A0101 | TRAV21 | TRAJ54 | TRAC | TRBV5-1 | TRBD1 | TRBJ2-1 | TRBC2 |
| TCR117 | EVDPIGHLY | A0101 | TRAV21 | TRAJ42 | TRAC | TRBV7-9 | TRBD1 | TRBJ2-7 | TRBC2 |
| TCR118 | EVDPIGHLY | A0101 | TRAV21 | TRAJ4 | TRAC | TRBV20-1 | TRBD1 | TRBJ2-7 | TRBC2 |
| TCR119 | EVDPIGHLY | A0101 | TRAV21 | TRAJ40 | TRAC | TRBV29-1 | None | TRBJ2-2 | TRBC2 |
| TCR120 | EVDPIGHLY | A0101 | TRAV29DV5 | TRAJ49 | None | TRBV10-2 | TRBD1 | TRBJ2-7 | TRBC2 |
| TCR121 | EVDPIGHLY | A0101 | TRAV21 | TRAJ40 | TRAC | TRBV27 | TRBD2 | TRBJ2-2 | TRBC2 |
| TCR122 | EVDPIGHLY | A0101 | TRAV21 | TRAJ11 | TRAC | TRBV5-4 | None | TRBJ2-2 | TRBC1 |
| TCR123 | EVDPIGHLY | A0101 | TRAV12-3 | TRAJ20 | TRAC | TRBV20-1 | TRBD2 | TRBJ2-3 | TRBC2 |
| TCR124 | EVDPIGHLY | A0101 | TRAV26-2 | TRAJ49 | TRAC | TRBV19 | None | TRBJ1-5 | TRBC1 |
| TCR125 | EVDPIGHLY | A0101 | TRAV12-3 | TRAJ20 | TRAC | TRBV6-1 | TRBD2 | TRBJ2-1 | TRBC2 |
| TCR126 | EVDPIGHLY | A0101 | TRAV17 | TRAJ34 | TRAC | TRBV11-1 | TRBD1 | TRBJ1-2 | TRBC1 |
| TCR127 | EVDPIGHLY | A0101 | TRAV12-3 | TRAJ20 | TRAC | TRBV10-3 | None | TRBJ1-1 | TRBC1 |
| TCR128 | EVDPIGHLY | A0101 | TRAV21 | TRAJ26 | TRAC | TRBV5-6 | TRBD1 | TRBJ2-7 | TRBC2 |
| TCR129 | EVDPIGHLY | A0101 | TRAV29DV5 | TRAJ4 | TRAC | TRBV27 | TRBD1 | TRBJI-5 | TRBC1 |
| TCR130 | EVDPIGHLY | A0101 | TRAV4 | TRAJ47 | TRAC | TRBV20-1 | TRBD2 | TRBJ1-2 | TRBC1 |
| TCR131 | EVDPIGHLY | A0101 | TRAV13-1 | TRAJ49 | TRAC | TRBV27 | TRBD1 | TRBJ2-7 | TRBC2 |
| TCR132 | EVDPIGHLY | A0101 | TRAV12-1 | TRAJ10 | TRAC | TRBV25-1 | TRBD1 | TRBJ2-7 | TRBC2 |
| TCR133 | EVDPIGHLY | A0101 | TRAV29DV5 | TRAJ39 | TRAC | TRBV7-9 | None | TRBJ2-7 | TRBC2 |
| TCR134 | EVDPIGHLY | A0101 | TRAV21 | TRAJ47 | TRAC | TRBV9 | TRBD1 | TRBJ1-1 | TRBC1 |
| TCR135 | EVDPIGHLY | A0101 | TRAV39 | TRAJ41 | TRAC | TRBV13 | None | TRBJ1-4 | TRBC1 |
| TCR136 | EVDPIGHLY | A0101 | TRAV17 | TRAJ53 | TRAC | TRBV29-1 | TRBD1 | TRBJ2-1 | TRBC2 |
| TCR137 | EVDPIGHLY | A0101 | TRAV26-1 | TRAJ42 | TRAC | TRBVI9 | TRBD1 | TRBJ2-3 | TRBC2 |
| TCR138 | EVDPIGHLY | A0101 | TRAV8-6 | TRAJ50 | TRAC | TRBV9 | TRBD1 | TRBJ2-7 | TRBC2 |
| TCR139 | EVDPIGHLY | A0101 | TRAV19 | TRAJ10 | TRAC | TRBV7-9 | None | TRBJ2-7 | TRBC2 |
| TCR140 | EVDPIGHLY | A0101 | TRAV8-4 | TRAJ42 | TRAC | TRBV3-1 | TRBD2 | TRBJ2-1 | TRBC2 |
| TCR141 | EVDPIGHLY | A0101 | TRAV12-1 | TRAJ47 | TRAC | TRBV5-8 | TRBD1 | TRBJ1-1 | TRBC1 |
| TCR142 | EVDPIGHLY | A0101 | TRAV29DV5 | TRAJ42 | TRAC | TRBV10-3 | None | TRBJ2-7 | TRBC2 |
| TCR143 | EVDPIGHLY | A0101 | TRAV13-2 | TRAJ20 | TRAC | TRBV27 | TRBD2 | TRBJ1-1 | TRBC1 |
| TCR144 | EVDPIGHLY | A0101 | TRAV10 | TRAJ9 | TRAC | TRBV3-1 | TRBD1 | TRBJ1-3 | TRBC1 |
| TCR145 | EVDPIGHLY | A0101 | TRAV19 | TRAJ27 | TRAC | TRBV27 | TRBD1 | TRBJ2-7 | TRBC2 |
| TCR146 | EVDPIGHLY | A0101 | TRAV9-2 | TRAJ20 | TRAC | TRBV12-4 | TRBD1 | TRBJ2-1 | TRBC2 |
| TCR147 | EVDPIGHLY | A0101 | TRAV12-2 | TRAJ20 | TRAC | TRBV7-6 | TRBD2 | TRBJ2-1 | TRBC2 |
| TCR148 | EVDPIGHLY | A0101 | TRAV12-1 | TRAJ17 | TRAC | TRBV20-1 | TRBD2 | TRBJ1-2 | TRBC1 |
| TCR149 | EVDPIGHLY | A0101 | TRAV30 | TRAJ58 | TRAC | TRBV19 | None | TRBJ2-7 | TRBC2 |
| TCR150 | EVDPIGHLY | A0101 | TRAV8-1 | TRAJ43 | TRAC | TRBV7-8 | TRBD2 | TRBJ2-1 | TRBC2 |
| TCR151 | EVDPIGHLY | A0101 | TRAV13-1 | TRAJ9 | TRAC | TRBV9 | TRBD1 | TRBJ2-5 | TRBC2 |
| TCR152 | EVDPIGHLY | A0101 | TRAV12-1 | TRAJ29 | TRAC | TRBV6-1 | TRBD1 | TRBJ1-2 | TRBC1 |
| TCR153 | EVDPIGHLY | A0101 | TRAV19 | TRAJ40 | TRAC | TRBV20-1 | TRBD2 | TRBJ2-3 | TRBC2 |
| TCR154 | EVDPIGHLY | A0101 | TRAV21 | TRAJ43 | TRAC | TRBV7-3 | None | TRBJ2-2 | TRBC2 |
| TCR155 | EVDPIGHLY | A0101 | TRAV21 | TRAJ4 | TRAC | TRBV5-1 | TRBD1 | TRBJ2-1 | TRBC2 |
| TCR156 | EVDPIGHLY | A0101 | TRAV26-2 | TRAJ32 | TRAC | TRBV24-1 | TRBD1 | TRBJ2-2 | TRBC2 |
| TCR157 | EVDPIGHLY | A0101 | TRAV21 | TRAJ4 | TRAC | TRBV20-1 | TRBD2 | TRBJ1-2 | TRBC1 |
| TCR158 | EVDPIGHLY | A0101 | TRAV19 | TRAJ15 | TRAC | TRBV7-8 | TRBD1 | TRBJ2-7 | TRBC2 |
| TCR159 | EVDPIGHLY | A0101 | TRAV19 | TRAJ40 | TRAC | TRBV6-1 | TRBD2 | TRBJ2-1 | TRBC2 |
| TCR160 | EVDPIGHLY | A0101 | TRAV12-2 | TRAJ13 | TRAC | TRBV25-1 | None | TRBJ2-7 | TRBC2 |
| TCR161 | EVDPIGHLY | A0101 | TRAV29DV5 | TRAJ54 | TRAC | TRBV7-8 | None | TRBJ2-1 | TRBC2 |
| TCR162 | EVDPIGHLY | A0101 | TRAV19 | TRAJ53 | TRAC | TRBV20-1 | TRBD1 | TRBJ2-7 | TRBC2 |
| TCR163 | EVDPIGHLY | A0101 | TRAV23DV6 | TRAJ36 | TRAC | TRBV9 | TRBD2 | TRBJ1-2 | TRBC1 |
| TCR164 | EVDPIGHLY | A0101 | TRAV19 | TRAJ40 | TRAC | TRBV10-3 | None | TRBJ1-1 | TRBC1 |
| TCR165 | EVDPIGHLY | A0101 | TRAV8-6 | TRAJ32 | TRAC | TRBV19 | TRBD1 | TRBJ1-1 | TRBC1 |
| TCR166 | EVDPIGHLY | A0101 | TRAV1-1 | TRAJ13 | TRAC | TRBV14 | TRBD1 | TRBJ2-1 | TRBC2 |
| TCR167 | EVDPIGHLY | A0101 | TRAV21 | TRAJ6 | TRAC | TRBV20-1 | TRBD1 | TRBJ2-7 | TRBC2 |
| TCR168 | EVDPIGHLY | A0101 | TRAV2I | TRAJ44 | TRAC | TRBV9 | None | TRBJ2-7 | TRBC2 |
| TCR169 | EVDPIGHLY | A0101 | TRAV29DV5 | TRAJ3 | TRAC | TRBV3-1 | TRBD2 | TRBJ2-5 | TRBC2 |
| TCR170 | EVDPIGHLY | A0101 | TRAV17 | TRAJ39 | TRAC | TRBV7-2 | None | TRBJ1-2 | TRBC1 |
| TCR171 | EVDPIGHLY | A0101 | TRAV26-2 | TRAJ12 | TRAC | TRBV7-9 | TRBD1 | TRBJ1-2 | TRBC1 |
| TCR172 | EVDPIGHLY | A0101 | TRAV29DV5 | TRAJ22 | TRAC | TRBV11-3 | TRBD1 | TRBJ2-7 | TRBC2 |
| TCR173 | EVDPIGHLY | A0101 | TRAV21 | TRAJ20 | TRAC | TRBVI2-4 | TRBD2 | TRBJ2-3 | TRBC2 |
| TCR174 | EVDPIGHLY | A0101 | TRAV12-3 | TRAJ3 | TRAC | TRBV27 | TRBD1 | TRBJ2-7 | TRBC2 |
| TCR175 | EVDPIGHLY | A0101 | TRAV27 | TRAJ33 | TRAC | TRBV6-5 | TRBD2 | TRBJ2-2 | TRBC2 |
| TCR176 | EVDPIGHLY | A0101 | TRAV13-1 | TRAJ22 | TRAC | TRBV12-4 | TRBD1 | TRBJ2-3 | TRBC2 |
| TCR177 | EVDPIGHLY | A0101 | TRAV26-1 | TRAJ34 | TRAC | TRBV27 | None | TRBJ1-2 | TRBC1 |
| TCR178 | EVDPIGHLY | A0101 | TRAV10 | TRAJ4 | TRAC | TRBV7-9 | TRBD1 | TRBJ2-4 | TRBC2 |
| TCR179 | EVDPIGHLY | A0101 | TRAV21 | TRAJ6 | TRAC | TRBV20-1 | TRBD2 | TRBJ1-2 | TRBC1 |
| TCR180 | EVDPIGHLY | A0101 | TRAV12-3 | TRAJ20 | TRAC | TRBV9 | TRBD1 | TRBJ1-1 | TRBC1 |
| TCR181 | EVDPIGHLY | A0101 | TRAV21 | TRAJ26 | TRAC | TRBV10-3 | None | TRBJ1-1 | TRBC1 |
| TCR182 | EVDPIGHLY | A0101 | TRAV12-2 | TRAJ20 | TRAC | TRBVI8 | TRBD1 | TRBJ2-7 | TRBC2 |
| TCR183 | EVDPIGHLY | A0101 | TRAV9-2 | TRAJ23 | TRAC | TRBV11-3 | TRBD1 | TRBJ1-1 | TRBC1 |
| TCR184 | EVDPIGHLY | A0101 | TRAV21 | TRAJ6 | TRAC | TRBV6-1 | TRBD2 | TRBJ2-1 | TRBC2 |
| TCR185 | EVDPIGHLY | A0101 | TRAV12-3 | TRAJ20 | TRAC | TRBV7-8 | TRBD1 | TRBJ2-2 | TRBC2 |
| TCR186 | EVDPIGHLY | A0101 | TRAV9-2 | TRAJ23 | TRAC | TRBV10-3 | None | TRBJ1-1 | TRBC1 |
| TCR187 | EVDPIGHLY | A0101 | TRAV24 | TRAJ45 | TRAC | TRBV5-4 | TRBD1 | TRBJ1-4 | TRBC1 |
| TCR188 | EVDPIGHLY | A0101 | TRAV13-1 | TRAJ3 | TRAC | TRBV27 | TRBD2 | TRBJ1-1 | TRBC1 |
| TCR189 | EVDPIGHLY | A0101 | TRAV20 | TRAJ20 | TRAC | TRBV7-2 | TRBD1 | TRBJ2-7 | TRBC2 |
| TCR190 | EVDPIGHLY | A0101 | TRAV8-4 | TRAJ42 | TRAC | TRBV9 | TRBD1 | TRBJ2-1 | TRBC2 |
| TCR191 | EVDPIGHLY | A0101 | TRAV1-2 | TRAJ31 | TRAC | TRBV7-9 | TRBD1 | TRBJ1-5 | TRBC1 |
| TCR192 | EVDPIGHLY | A0101 | TRAV12-1 | TRAJ13 | TRAC | TRBV20-1 | TRBD1 | TRBJ2-7 | TRBC2 |
| TCR193 | EVDPIGHLY | A0101 | TRAV12-1 | TRAJ4 | TRAC | TRBV28 | TRBD2 | TRBJ2-7 | TRBC2 |
| TCR194 | EVDPIGHLY | A0101 | TRAV21 | TRAJ4 | TRAC | TRBV27 | TRBD2 | TRBJ2-2 | TRBC2 |
| TCR195 | EVDPIGHLY | A0101 | TRAV3 | TRAJ9 | TRAC | TRBV7-9 | TRBD1 | TRBJ2-7 | TRBC2 |
| TCR196 | EVDPIGHLY | A0101 | TRAV26-1 | TRAJ42 | TRAC | TRBVI9 | None | TRBJ2-2 | TRBC2 |
| TCR197 | EVDPIGHLY | A0101 | TRAV21 | TRAJ47 | TRAC | TRBVI9 | None | TRBJI -1 | TRBC1 |
| TCR198 | EVDPIGHLY | A0101 | TRAV26-1 | TRAJ34 | TRAC | TRBV20-1 | TRBD2 | TRBJ1-2 | TRBC1 |
| TCR199 | EVDPIGHLY | A0101 | TRAV21 | TRAJ31 | TRAC | TRBV20-1 | TRBD1 | TRBJ2-7 | TRBC2 |
| TCR200 | EVDPIGHLY | A0101 | TRAV12-1 | TRAJ11 | TRAC | TRBV20-1 | TRBD2 | TRBJ1-2 | TRBC1 |
| TCR201 | EVDPIGHLY | A0101 | TRAV17 | TRAJ34 | TRAC | TRBV6-1 | TRBD2 | TRBJ2-1 | TRBC2 |
| TCR202 | EVDPIGHLY | A0101 | TRAV13-2 | TRAJ47 | TRAC | TRBV19 | TRBD2 | TRBJ2-1 | TRBC2 |
| TCR203 | EVDPIGHLY | A0101 | TRAV29DV5 | TRAJ28 | TRAC | TRBV27 | TRBD2 | TRBJ2-4 | TRBC2 |
| TCR204 | EVDPIGHLY | A0101 | TRAV13-2 | TRAJ17 | TRAC | TRBV27 | TRBD2 | TRBJ1-5 | TRBC1 |
| TCR205 | EVDPIGHLY | A0101 | TRAV38-2DV8 | TRAJ57 | TRAC | TRBV5-4 | TRBD1 | TRBJ1-2 | TRBC1 |
| TCR206 | EVDPIGHLY | A0101 | TRAV17 | TRAJ32 | TRAC | TRBV7-8 | TRBD2 | TRBJ2-1 | TRBC2 |
| TCR207 | EVDPIGHLY | A0101 | TRAV21 | TRAJ39 | TRAC | TRBV20-1 | TRBD1 | TRBJ2-7 | TRBC2 |
| TCR208 | EVDPIGHLY | A0101 | TRAV12-3 | TRAJ20 | TRAC | TRBV7-9 | TRBD1 | TRBJ2-3 | TRBC2 |
| TCR209 | EVDPIGHLY | A0101 | TRAV1-1 | TRAJ4 | TRAC | TRBV20-1 | TRBD1 | TRBJ2-7 | TRBC2 |
| TCR210 | EVDPIGHLY | A0101 | TRAV12-1 | TRAJ9 | TRAC | TRBV2 | TRBD1 | TRBJ2-7 | TRBC2 |
| TCR211 | EVDPIGHLY | A0101 | TRAV19 | TRAJ32 | TRAC | TRBV9 | TRBD1 | TRBJ1-2 | TRBC1 |
| TCR212 | EVDPIGHLY | A0101 | TRAV8-3 | TRAJ6 | TRAC | TRBV9 | TRBD2 | TRBJ2-1 | TRBC2 |
| TCR213 | EVDPIGHLY | A0101 | TRAV19 | TRAJ40 | TRAC | TRBV7-9 | None | TRBJ2-7 | TRBC2 |
| TCR214 | EVDPIGHLY | A0101 | TRAV5 | TRAJ37 | TRAC | TRBV5-6 | TRBD2 | TRBJ1-1 | TRBC1 |
| TCR215 | EVDPIGHLY | A0101 | TRAV21 | TRAJ33 | TRAC | TRBV20-1 | TRBD2 | TRBJ1-2 | TRBC1 |
| TCR216 | EVDPIGHLY | A0101 | TRAV29DV5 | TRAJ3 | TRAC | TRBV20-1 | TRBD1 | TRBJ2-7 | TRBC2 |
| TCR217 | EVDPIGHLY | A0101 | TRAV1-1 | TRAJ4 | TRAC | TRBV20-1 | TRBD2 | TRBJ1-2 | TRBC1 |
| TCR218 | EVDPIGHLY | A0101 | TRAV 21 | TRAJ6 | TRAC | TRBV10-3 | None | TRBJ1-1 | TRBC1 |
| TCR219 | EVDPIGHLY | A0101 | TRAV19 | TRAJ23 | TRAC | TRBV9 | TRBD1 | TRBJ1-1 | TRBC1 |
| TCR220 | EVDPIGHLY | A0101 | TRAV12-2 | TRAJ20 | TRAC | TRBV11-2 | TRBD2 | TRBJ2-2 | TRBC2 |
| TCR221 | EVDPIGHLY | A0101 | TRAV1-2 | TRAJ15 | TRAC | TRBV24-1 | TRBD2 | TRBJ2-1 | TRBC2 |
| TCR222 | EVDPIGHLY | A0101 | TRAV21 | TRAJ9 | TRAC | TRBV5-4 | None | TRBJ1-6 | TRBC1 |
| TCR223 | EVDPIGHLY | A0101 | TRAV8-6 | TRAJ12 | TRAC | TRBV7-9 | TRBD1 | TRBJ2-2 | TRBC2 |
| TCR224 | EVDPIGHLY | A0101 | TRAV21 | TRAJ31 | TRAC | TRBV11-2 | TRBD2 | TRBJ1-2 | TRBC1 |
| TCR225 | EVDPIGHLY | A0101 | TRAV21 | TRAJ41 | TRAC | TRBV9 | TRBD1 | TRBJ1-1 | TRBC1 |
| TCR226 | EVDPIGHLY | A0101 | TRAV25 | TRAJ28 | TRAC | TRBV7-2 | TRBD2 | TRBJ2-6 | TRBC2 |
| TCR227 | EVDPIGHLY | A0101 | TRAV21 | TRAJ33 | TRAC | TRBV10-3 | TRBD1 | TRBJ1-3 | TRBC1 |
| TCR228 | EVDPIGHLY | A0101 | TRAV21 | TRAJ49 | TRAC | TRBV5-1 | TRBD1 | TRBJ2-5 | TRBC2 |
| TCR229 | EVDPIGHLY | A0101 | TRAV1-1 | TRAJ34 | TRAC | TRBV6-6 | None | TRBJ1-5 | TRBC1 |
| TCR230 | EVDPIGHLY | A0101 | TRAV24 | TRAJ6 | TRAC | TRBV7-2 | TRBD1 | TRBJ2-1 | TRBC2 |
| TCR231 | EVDPIGHLY | A0101 | TRAV1-1 | TRAJ15 | TRAC | TRBV6-6 | None | TRBJ1-5 | TRBC1 |
| TCR232 | EVDPIGHLY | A0101 | TRAV21 | TRAJ15 | TRAC | TRBV29-1 | None | TRBJ1-1 | TRBC1 |
| TCR233 | EVDPIGHLY | A0101 | TRAV21 | TRAJ43 | TRAC | TRBV12-4 | None | TRBJ1-5 | TRBC1 |
| TCR234 | EVDPIGHLY | A0101 | TRAV21 | TRAJ30 | TRAC | TRBV9 | TRBD1 | TRBJ1-4 | TRBC1 |
| TCR235 | EVDPIGHLY | A0101 | TRAV2I | TRAJ31 | TRAC | TRBV5-1 | TRBD1 | TRBJ2-7 | TRBC2 |
| TCR236 | EVDPIGHLY | A0101 | TRAV26-1 | TRAJ45 | TRAC | TRBV19 | TRBD2 | TRBJ2-1 | TRBC2 |
| TCR237 | EVDPIGHLY | A0101 | TRAV21 | TRAJ43 | TRAC | TRBV24-1 | TRBD2 | TRBJ2-1 | TRBC2 |
| TCR238 | EVDPIGHLY | A0101 | TRAV21 | TRAJ31 | TRAC | TRBV24-1 | TRBD2 | TRBJ2-1 | TRBC2 |
| TCR239 | EVDPIGHLY | A0101 | TRAV29DV5 | TRAJ28 | TRAC | TRBV4-1 | TRBD1 | TRBJ1-4 | TRBC1 |
| TCR240 | EVDPIGHLY | A0101 | TRAV26-2 | TRAJ44 | TRAC | TRBV27 | None | TRBJ2-1 | TRBC2 |
| TCR241 | EVDPIGHLY | A0101 | TRAV21 | TRAJ31 | TRAC | TRBV9 | TRBD1 | TRBJ1-5 | TRBC1 |
| TCR242 | EVDPIGHLY | A0101 | TRAV21 | TRAJ36 | TRAC | TRBV9 | TRBD1 | TRBJ1-2 | TRBC1 |
| TCR243 | EVDPIGHLY | A0101 | TRAV21 | TRAJ9 | TRAC | TRBV9 | TRBD1 | TRBJ1-1 | TRBC1 |
| TCR244 | EVDPIGHLY | A0101 | TRAV8-3 | TRAJ15 | TRAC | TRBV4-1 | None | TRBJ2-1 | TRBC2 |
| TCR245 | EVDPIGHLY | A0101 | TRAV21 | TRAJ43 | TRAC | TRBV24-1 | TRBD1 | TRBJ2-3 | TRBC2 |
| TCR246 | EVDPIGHLY | A0101 | TRAV29DV5 | TRAJ40 | TRAC | TRBV7-9 | TRBD1 | TRBJ1-6 | TRBC1 |
| TCR247 | EVDPIGHLY | A0101 | TRAV30 | TRAJ32 | TRAC | TRBV28 | TRBD1 | TRBJ1-1 | TRBC1 |
| TCR248 | EVDPIGHLY | A0101 | TRAV38-2DV8 | TRAJ26 | TRAC | TRBV7-9 | TRBD2 | TRBJ2-5 | TRBC2 |
| TCR249 | EVDPIGHLY | A0101 | TRAV12-1 | TRAJ6 | TRAC | TRBV20-1 | TRBD1 | TRBJ1-3 | TRBC1 |
| TCR250 | EVDPIGHLY | A0101 | TRAV21 | TRAJ47 | TRAC | TRBV5-1 | None | TRBJ1-1 | TRBC1 |
| TCR251 | EVDPIGHLY | A0101 | TRAV38-2DV8 | TRAJ45 | TRAC | TRBV29-1 | TRBD1 | TRBJ2-7 | TRBC2 |
| TCR252 | EVDPIGHLY | A0101 | TRAV21 | TRAJ15 | TRAC | TRBV7-2 | None | TRBJ1-1 | TRBC1 |
| TCR253 | EVDPIGHLY | A0101 | TRAV12-2 | TRAJ29 | TRAC | TRBV9 | TRBD1 | TRBJ1-1 | TRBC1 |
| TCR254 | EVDPIGHLY | A0101 | TRAV3 | TRAJ6 | TRAC | TRBV28 | TRBD1 | TRBJ2-7 | TRBC2 |
| TCR255 | EVDPIGHLY | A0101 | TRAV21 | TRAJ9 | TRAC | TRBV10-3 | TRBD1 | TRBJ1-3 | TRBC1 |
| TCR256 | EVDPIGHLY | A0101 | TRAV1-2 | TRAJ15 | TRAC | TRBV7-9 | TRBD1 | TRBJ2-2 | TRBC2 |
| T1R257 | EVDPIGHLY | A0101 | TRAV8-6 | TRAJ40 | TRAC | TRBV15 | None | TRBJ2-5 | TRBC2 |
| TCR258 | EVDPIGHLY | A0101 | TRAV38-2DV8 | TRAJ57 | TRAC | TRBV13 | TRBD1 | TRBJ1-4 | TRBC1 |
| TCR259 | EVDPIGHLY | A0101 | TRAV8-6 | TRAJ10 | TRAC | TRBV7-9 | None | TRBJ1-1 | TRBC1 |
| TCR260 | EVDPIGHLY | A0101 | TRAV21 | TRAJ20 | TRAC | TRBV5-4 | TRBD1 | TRBJ1-5 | TRBC1 |
| TCR261 | EVDPIGHLY | A0101 | TRAV13-1 | TRAJ28 | TRAC | TRBV7-8 | TRBD1 | TRBJ1-5 | TRBC1 |
| TCR262 | EVDPIGHLY | A0101 | TRAV21 | TRAJ9 | TRAC | TRBV24-1 | TRBD2 | TRBJ2-1 | TRBC2 |
| TCR263 | EVDPIGHLY | A0101 | TRAV1-2 | TRAJ15 | TRAC | TRBV2 | TRBD2 | TRBJ2-1 | TRBC2 |
| TCR264 | EVDPIGHLY | A0101 | TRAV35 | TRAJ26 | TRAC | TRBV27 | TRBD1 | TRBJ1-1 | TRBC1 |
| TCR265 | EVDPIGHLY | A0101 | TRAV38-2DV8 | TRAJ43 | TRAC | TRBV5-1 | TRBD2 | TRBJ2-5 | TRBC2 |
| TCR266 | EVDPIGHLY | A0101 | TRAV5 | TRAJ32 | TRAC | TRBV19 | TRBD2 | TRBJ2-7 | TRBC2 |
| TCR267 | EVDPIGHLY | A0101 | TRAV13-1 | TRAJ21 | TRAC | TRBV5-1 | TRBD2 | TRBJ2-7 | TRBC2 |
| TCR268 | EVDPIGHLY | A0101 | TRAV12-2 | TRAJ45 | TRAC | TRBVI2-4 | TRBD1 | TRBJ2-1 | TRBC2 |
| TCR269 | EVDPIGHLY | A0101 | TRAV21 | TRAJ31 | TRAC | TRBVI2-5 | None | TRBJ2-2 | TRBC2 |
| TCR270 | EVDPIGHLY | A0101 | TRAV24 | TRAJ52 | TRAC | TRBV27 | None | TRBJ2-1 | TRBC2 |
| TCR271 | EVDPIGHLY | A0101 | TRAV21 | TRAJ52 | TRAC | TRBV19 | TRBD1 | TRBJ1-1 | TRBC1 |
| TCR272 | EVDPIGHLY | A0101 | TRAV36DV7 | TRAJ44 | TRAC | TRBV7-9 | TRBD1 | TRBJ2-2 | TRBC2 |
| TCR273 | EVDPIGHLY | A0101 | TRAV3 | TRAJ29 | TRAC | TRBV11-2 | TRBD1 | TRBJ2-5 | TRBC2 |
| TCR274 | EVDPIGHLY | A0101 | TRAV1-1 | TRAJ15 | TRAC | TRBVI3 | TRBD1 | TRBJ1-2 | TRBC1 |
| TCR275 | EVDPIGHLY | A0101 | TRAV29DV5 | TRAJ52 | TRAC | TRBV11-3 | TRBD1 | TRBJ2-3 | TRBC2 |
| TCR276 | EVDPIGHLY | A0101 | TRAV12-1 | TRAJ6 | TRAC | TRBVI9 | TRBD1 | TRBJ1-1 | TRBC1 |
| TCR277 | EVDPIGHLY | A0101 | TRAV19 | TRAJ13 | TRAC | TRBV27 | TRBD2 | TRBJ2-7 | TRBC2 |
| TCR278 | EVDPIGHLY | A0101 | TRAV17 | TRAJ43 | TRAC | TRBV12-3 | None | TRBJ1-4 | TRBC1 |
| TCR279 | EVDPIGHLY | A0101 | TRAV12-3 | TRAJ20 | TRAC | TRBV12-4 | None | TRBJ2-1 | TRBC2 |
| TCR280 | EVDPIGHLY | A0101 | TRAV21 | TRAJ52 | TRAC | TRBV4-1 | TRBD2 | TRBJ2-7 | TRBC2 |
| TCR281 | EVDPIGHLY | A0101 | TRAV21 | TRAJ23 | TRAC | TRBV19 | TRBD1 | TRBJ2-7 | TRBC2 |
| TCR282 | EVDPIGHLY | A0101 | TRAV1-1 | TRAJ30 | TRAC | TRBV13 | TRBD1 | TRBJ1-2 | TRBC1 |
| TCR283 | EVDPIGHLY | A0101 | TRAV12-2 | TRAJ43 | TRAC | TRBV12-4 | TRBD2 | TRBJ2-7 | TRBC2 |
| TCR284 | EVDPIGHLY | A0101 | TRAV24 | TRAJ10 | TRAC | TRBV5-1 | TRBD1 | TRBJ1-2 | TRBC1 |
| TCR285 | EVDPIGHLY | A0101 | TRAV5 | TRAJ9 | TRAC | TRBV4-1 | TRBD1 | TRBJ1-1 | TRBC1 |
| TCR286 | EVDPIGHLY | A0101 | TRAV21 | TRAJ40 | TRAC | TRBV7-8 | None | TRBJ1-1 | TRBC1 |
| TCR287 | EVDPIGHLY | A0101 | TRAV13-1 | TRAJ45 | TRAC | TRBV9 | TRBD1 | TRBJ1-6 | TRBC1 |
| TCR288 | EVDPIGHLY | A0101 | TRAV12-1 | TRAJ26 | TRAC | TRBV4-1 | TRBD1 | TRBJ2-7 | TRBC2 |
| TCR289 | EVDPIGHLY | A0101 | TRAV26-2 | TRAJ45 | TRAC | TRBV19 | None | TRBJ1-2 | TRBC1 |
| TCR290 | EVDPIGHLY | A0101 | TRAV22 | TRAJ23 | TRAC | TRBV5-4 | TRBD1 | TRBJ1-1 | TRBC1 |
| TCR291 | EVDPIGHLY | A0101 | TRAV19 | TRAJ42 | TRAC | TRBV28 | None | TRBJ2-7 | TRBC2 |
| TCR292 | EVDPIGHLY | A0101 | TRAV17 | TRAJ52 | TRAC | TRBV7-8 | TRBD1 | TRBJ1-2 | TRBC1 |
| TCR293 | EVDPIGHLY | A0101 | TRAV12-1 | TRAJ39 | TRAC | TRBV3-1 | TRBD1 | TRBJ2-3 | TRBC2 |
| TCR294 | EVDPIGHLY | A0101 | TRAV21 | TRAJ9 | TRAC | TRBV5-1 | TRBD1 | TRBJ2-7 | TRBC2 |
| TCR295 | EVDPIGHLY | A0101 | TRAV1-1 | TRAJ5 | TRAC | TRBV24-1 | TRBD2 | TRBJ2-1 | TRBC2 |
| TCR296 | EVDPIGHLY | A0101 | TRAV23DV6 | TRAJ13 | TRAC | TRBV6-5 | TRBD1 | TRBJ2-1 | TRBC2 |
| TCR297 | EVDPIGHLY | A0101 | TRAV8-6 | TRAJ12 | TRAC | TRBV24-1 | TRBD2 | TRBJ2-1 | TRBC2 |
| TCR298 | EVDPIGHLY | A0101 | TRAV1-2 | TRAJ28 | TRAC | TRBV27 | None | TRBJ2-3 | TRBC2 |
| TCR299 | EVDPIGHLY | A0101 | TRAV29DV5 | TRAJ34 | TRAC | TRBV4-1 | TRBD2 | TRBJ2-3 | TRBC2 |
| TCR300 | EVDPIGHLY | A0101 | TRAV12-1 | TRAJ21 | TRAC | TRBV28 | TRBD1 | TRBJ1-5 | TRBC1 |
| TCR301 | EVDPIGHLY | A0101 | TRAV9-2 | TRAJ29 | TRAC | TRBV5-8 | TRBD2 | TRBJ1-1 | TRBC1 |
| TCR302 | EVDPIGHLY | A0101 | TRAV27 | TRAJ40 | TRAC | TRBV7-6 | None | TRBJ2-4 | TRBC2 |
| TCR303 | EVDPIGHLY | A0101 | TRAV21 | TRAJ31 | TRAC | TRBV7-8 | TRBD1 | TRBJ1-2 | TRBC1 |
| TCR304 | EVDPIGHLY | A0101 | TRAV21 | TRAJ30 | TRAC | TRBV9 | TRBD1 | TRBJ1-2 | TRBC1 |
| TCR305 | EVDPIGHLY | A0101 | TRAV19 | TRAJ30 | TRAC | TRBV20-1 | None | TRBJ2-1 | TRBC1 |
| TCR306 | EVDPIGHLY | A0101 | TRAV1-1 | TRAJ26 | TRAC | TRBV12-5 | TRBD2 | TRBJ2-1 | TRBC2 |
| TCR307 | EVDPIGHLY | A0101 | TRAV1-2 | TRAJ33 | TRAC | TRBV9 | TRBD2 | TRBJ2-3 | TRBC2 |
| TCR308 | EVDPIGHLY | A0101 | TRAV26-1 | TRAJ50 | TRAC | TRBV27 | TRBD1 | TRBJ2-3 | TRBC2 |
| TCR309 | EVDPIGHLY | A0101 | TRAV40 | TRAJ41 | TRAC | TRBV6-5 | TRBD2 | TRBJ1-2 | TRBC1 |
| TCR310 | EVDPIGHLY | A0101 | TRAV12-2 | TRAJ31 | TRAC | TRBV7-9 | TRBD1 | TRBJ1-5 | TRBC1 |
| TCR311 | EVDPIGHLY | A0101 | TRAV5 | TRAJ43 | TRAC | TRBV5-1 | TRBD1 | TRBJ2-3 | TRBC2 |
| TCR312 | EVDPIGHLY | A0101 | TRAV24 | TRAJ52 | TRAC | TRBV5-1 | None | TRBJ1-1 | TRBC1 |
| TCR313 | EVDPIGHLY | A0101 | TRAV1-2 | TRAJ11 | TRAC | TRBV7-6 | TRBD1 | TRBJ1-3 | TRBC1 |
| TCR314 | EVDPIGHLY | A0101 | TRAV21 | TRAJ33 | TRAC | TRBV5-1 | TRBD1 | TRBJ2-7 | TRBC2 |
| TCR315 | EVDPIGHLY | A0101 | TRAV21 | TRAJ39 | TRAC | TRBV10-3 | None | TRBJ2-1 | TRBC2 |
| TCR316 | EVDPIGHLY | A0101 | TRAV21 | TRAJ20 | TRAC | TRBV14 | TRBD1 | TRBJ1-2 | TRBC1 |
| TCR317 | EVDPIGHLY | A0101 | TRAV29DV5 | TRAJ48 | TRAC | TRBV7-9 | TRBD1 | TRBJ1-2 | TRBC1 |
| TCR318 | EVDPIGHLY | A0101 | TRAV13-1 | TRAJ22 | TRAC | TRBV291- | None | TRBJ1-1 | TRBC1 |
| TCR319 | EVDPIGHLY | A0101 | TRAV21 | TRAJ33 | TRAC | TRBV10-3 | None | TRBJ2-1 | TRBC2 |
| TCR320 | EVDPIGHLY | A0101 | TRAV39 | TRAJ49 | TRAC | TRBV24-1 | TRBD1 | TRBJ1-4 | TRBC1 |
| TCR321 | EVDPIGHLY | A0101 | TRAV13-1 | TRAJ23 | TRAC | TRBV27 | TRBD1 | TRBJ1-2 | TRBC1 |
| TCR322 | EVDPIGHLY | A0101 | TRAV21 | TRAJ9 | TRAC | TRBV9 | TRBD1 | TRBJ2-7 | TRBC2 |
| TCR323 | EVDPIGHLY | A0101 | TRAV21 | TRAJ33 | TRAC | TRBV9 | None | TRBJ1-1 | TRBC1 |
| TCR324 | EVDPIGHLY | A0101 | TRAV19 | TRAJ28 | TRAC | TRBV19 | TRBD1 | TRBJ1-4 | TRBC1 |
| TCR325 | EVDPIGHLY | A0101 | TRAV10 | TRAJ8 | TRAC | TRBV5-1 | TRBD1 | TRBJ2-7 | TRBC2 |
| TCR326 | EVDPIGHLY | A0101 | TRAV21 | TRAJ48 | TRAC | TRBV27 | TRBD2 | TRBJ2-2 | TRBC2 |
| TCR327 | EVDPIGHLY | A0101 | TRAV12-2 | TRAJ4 | TRAC | TRBV7-2 | TRBD2 | TRBJ2-1 | TRBC2 |
| TCR328 | EVDPIGHLY | A0101 | TRAV21 | TRAJ31 | TRAC | TRBV5-1 | None | TRBJ1-1 | TRBC1 |
| TCR329 | EVDPIGHLY | A0101 | TRAV21 | TRAJ33 | TRAC | TRBV9 | None | TRBJ1-1 | TRBC1 |
| TCR330 | EVDPIGHLY | A0101 | TRAV21 | TRAJ6 | TRAC | TRBV6-6 | TRBD1 | TRBJ1-5 | TRBC1 |
| TCR331 | EVDPIGHLY | A0101 | TRAV21 | TRAJ29 | TRAC | TRBV5-1 | TRBD2 | TRBJ2-5 | TRBC2 |
| TCR332 | EVDPIGHLY | A0101 | TRAV41 | TRAJ41 | TRAC | TRBV7-9 | TRBD1 | TRBJ1-2 | None |
| TCR333 | EVDPIGHLY | A0101 | TRAV21 | TRAJ33 | None | TRBV5-1 | None | TRBJ1-1 | TRBC1 |
| TCR334 | EVDPIGHLY | A0101 | TRAV17 | TRAJ39 | TRAC | TRBV27 | TRBD2 | TRBJ2-1 | TRBC2 |
| TCR335 | EVDPIGHLY | A0101 | TRAV13-2 | TRAJ13 | TRAC | TRBV9 | None | TRBJ1-3 | TRBC1 |
| TCR336 | EVDPIGHLY | A0101 | TRAV21 | TRAJ33 | TRAC | TRBV5-1 | TRBD2 | TRBJ2-5 | TRBC2 |
| TCR337 | EVDPIGHLY | A0101 | TRAV17 | TRAJ57 | TRAC | TRBV9 | TRBD2 | TRBJ1-1 | TRBC1 |
| TCR338 | EVDPIGHLY | A0101 | TRAV5 | TRAJ44 | TRAC | TRBV7-9 | TRBD1 | TRBJ1-1 | TRBC1 |
| TCR339 | EVDPIGHLY | A0101 | TRAV3 | TRAJ39 | TRAC | TRBV27 | TRBD1 | TRBJ1-5 | TRBC1 |
| TCR340 | EVDPIGHLY | A0101 | TRAV1-2 | TRAJ4 | TRAC | TRBV11-1 | TRBD2 | TRBJ2-1 | TRBC2 |
| TCR341 | EVDPIGHLY | A0101 | TRAV38-2DV8 | TRAJ40 | TRAC | TRBV7-8 | TRBD1 | TRBJ2-4 | TRBC2 |
| TCR342 | EVDPIGHLY | A0101 | TRAV8-3 | TRAJ41 | TRAC | TRBV7-9 | None | TRBJ1-1 | TRBC1 |
| TCR343 | EVDPIGHLY | A0101 | TRAV5 | TRAJ4 | TRAC | TRBV11-2 | None | TRBJ2-1 | TRBC2 |
| TCR344 | EVDPIGHLY | A0101 | TRAV24 | TRAJ49 | TRAC | TRBV6-5 | TRBD1 | TRBJ1-1 | TRBC1 |
| TCR345 | EVDPIGHLY | A0101 | TRAV4 | TRAJ45 | TRAC | TRBV24-1 | TRBD2 | TRBJ1-1 | TRBC1 |
| TCR346 | EVDPIGHLY | A0101 | TRAV29DV5 | TRAJ48 | TRAC | TRBV20-1 | TRBD2 | TRBJ2-7 | TRBC2 |
| TCR347 | EVDPIGHLY | A0101 | TRAV26-2 | TRAJ44 | TRAC | TRBV6-1 | None | TRBJ2-7 | TRBC2 |
| TCR348 | EVDPIGHLY | A0101 | TRAV21 | TRAJ27 | TRAC | TRBV7-9 | None | TRBJ1-6 | TRBC1 |
| TCR349 | EVDPIGHLY | A0101 | TRAV26-1 | TRAJ49 | TRAC | TRBV7-9 | None | TRBJ2-7 | TRBC2 |
| TCR350 | EVDPIGHLY | A0101 | TRAV12-1 | TRAJ5 | TRAC | TRBV7-8 | TRBD1 | TRBJ2-1 | TRBC2 |
| TCR351 | EVDPIGHLY | A0101 | TRAV21 | TRAJ33 | TRAC | TRBV9 | TRBD1 | TRBJ2-7 | TRBC2 |
| TCR352 | EVDPIGHLY | A0101 | TRAV21 | TRAJ20 | TRAC | TRBV27 | TRBD1 | TRBJ2-4 | TRBC2 |
| TCR353 | EVDPIGHLY | A0101 | TRAV39 | TRAJ42 | TRAC | TRBV9 | TRBD1 | TRBJ2-7 | TRBC2 |
| TCR354 | EVDPIGHLY | A0101 | TRAV1-2 | TRAJ39 | TRAC | TRBV27 | TRBD2 | TRBJ1-4 | TRBC1 |
| TCR355 | EVDPIGHLY | A0101 | TRAV1-1 | TRAJ34 | TRAC | TRBV9 | TRBD1 | TRBJ2-3 | TRBC2 |
| TCR356 | EVDPIGHLY | A0101 | TRAV25 | TRAJ34 | TRAC | TRBV29-1 | TRBD1 | TRBJ1-2 | TRBC1 |
| TCR357 | EVDPIGHLY | A0101 | TRAV39 | TRAJ39 | TRAC | TRBV30 | TRBD1 | TRBJ2-1 | TRBC2 |
| TCR358 | EVDPIGHLY | A0101 | TRAV21 | TRAJ6 | TRAC | TRBV20-1 | TRBD2 | TRBJ1-1 | TRBC1 |
| TCR359 | EVDPIGHLY | A0101 | TRAV8-6 | TRAJ30 | TRAC | TRBV9 | TRBD2 | TRBJ2-2 | TRBC2 |
| TCR360 | EVDPIGHLY | A0101 | TRAV21 | TRAJ18 | TRAC | TRBV27 | TRBD1 | TRBJ1-2 | TRBC1 |
| TCR361 | EVDPIGHLY | A0101 | TRAV12-3 | TRAJ23 | TRAC | TRBV11-3 | TRBD1 | TRBJ2-2 | TRBC2 |
| TCR362 | EVDPIGHLY | A0101 | TRAV12-1 | TRAJ47 | TRAC | TRBV5-6 | None | TRBJ1-2 | TRBC1 |
| TCR363 | EVDPIGHLY | A0101 | TRAV22 | TRAJ31 | TRAC | TRBV5-6 | None | TRBJ2-7 | TRBC2 |
| TCR364 | EVDPIGHLY | A0101 | TRAV21 | TRAJ33 | TRAC | TRBV14 | TRBD1 | TRBJ1-2 | TRBC1 |
| TCR365 | EVDPIGHLY | A0101 | TRAV1-2 | TRAJ31 | TRAC | TRBV2 | TRBD2 | TRBJ2-7 | TRBC2 |
| TCR366 | EVDPIGHLY | A0101 | TRAV1-2 | TRAJ5 | TRAC | TRBV20-1 | TRBD2 | TRBJ2-7 | TRBC2 |
| TCR367 | EVDPIGHLY | A0101 | TRAV21 | TRAJ33 | TRAC | TRBV5-1 | TRBD1 | TRBJ1-2 | TRBC1 |
| TCR368 | EVDPIGHLY | A0101 | TRAV16 | TRAJ28 | TRAC | TRBV7-9 | TRBD1 | TRBJ2-1 | TRBC2 |
| TCR369 | EVDPIGHLY | A0101 | TRAV13-1 | TRAJ12 | TRAC | TRBV20-1 | TRBD2 | TRBJ1-1 | TRBC1 |
| TCR370 | EVDPIGHLY | A0101 | TRAV17 | TRAJ52 | TRAC | TRBV29-1 | TRBD2 | TRBJ2-1 | TRBC2 |
| TCR371 | EVDPIGHLY | A0101 | TRAV36DV7 | TRAJ49 | TRAC | TRBV15 | TRBD2 | TRBJ2-3 | TRBC2 |
| TCR372 | EVDPIGHLY | A0101 | TRAV12-3 | TRAJ58 | TRAC | TRBV12-4 | TRBD2 | TRBJ2-1 | TRBC2 |
| TCR373 | EVDPIGHLY | A0101 | TRAV16 | TRAJ18 | TRAC | TRBV27 | TRBD1 | TRBJ2-7 | TRBC2 |
| TCR374 | EVDPIGHLY | A0101 | TRAV21 | TRAJ33 | TRAC | TRBV27 | TRBD2 | TRBJ2-2 | TRBC2 |
| TCR375 | EVDPIGHLY | A0101 | TRAV12-2 | TRAJ48 | TRAC | TRBV27 | None | TRBJ2-6 | TRBC2 |
| TCR376 | EVDPIGHLY | A0101 | TRAV21 | TRAJ33 | TRAC | TRBV2 | TRBD1 | TRBJ1-2 | TRBC1 |
| TCR377 | EVDPIGHLY | A0101 | TRAV29DV5 | TRAJ37 | TRAC | TRBV5-4 | TRBD2 | TRBJ2-7 | TRBC2 |
| TCR378 | EVDPIGHLY | A0101 | TRAV21 | TRAJ20 | TRAC | TRBV24-1 | TRBD1 | TRBJ1-4 | TRBC1 |
| TCR379 | EVDPIGHLY | A0101 | TRAV12-2 | TRAJ6 | TRAC | TRBV15 | TRBD1 | TRBJ2-2 | TRBC2 |
| TCR380 | EVDPIGHLY | A0101 | TRAV12-1 | TRAJ42 | TRAC | TRBV27 | TRBD1 | TRBJ1-5 | TRBC1 |
| TCR381 | EVDPIGHLY | A0101 | TRAV1-1 | TRAJ23 | TRAC | TRBV25-1 | TRBD1 | TRBJ2-7 | TRBC2 |
| TCR382 | EVDPIGHLY | A0101 | TRAV38-1 | TRAJ28 | TRAC | TRBV5-1 | TRBD1 | TRBJ2-1 | TRBC2 |
| TCR383 | EVDPIGHLY | A0101 | TRAV21 | TRAJ33 | TRAC | TRBV2 | TRBD1 | TRBJ1-1 | TRBC1 |
| TCR384 | EVDPIGHLY | A0101 | TRAV21 | TRAJ31 | TRAC | TRBV5-1 | TRBD1 | TRBJ2-7 | TRBC2 |
| TCR385 | EVDPIGHLY | A0101 | TRAV8-6 | TRAJ42 | TRAC | TRBV27 | None | TRBJ1-1 | TRBC1 |
| TCR386 | EVDPIGHLY | A0101 | TRAV40 | TRAJ32 | TRAC | TRBV7-6 | None | TRBJ2-2 | TRBC2 |
| TCR387 | EVDPIGHLY | A0101 | TRAV5 | TRAJ5 | TRAC | TRBV20-1 | TRBD1 | TRBJ2-5 | TRBC2 |
| TCR388 | EVDPIGHLY | A0101 | TRAV12-1 | TRAJ40 | TRAC | TRBV4-1 | None | TRBJ2-5 | TRBC2 |
| TCR389 | EVDPIGHLY | A0101 | TRAV13-2 | TRAJ53 | TRAC | TRBV5-1 | None | TRBJ1-1 | TRBC1 |
| TCR390 | EVDPIGHLY | A0101 | TRAV12-2 | TRAJ48 | TRAC | TRBV5-6 | TRBD1 | TRBJ2-2 | TRBC2 |
| TCR391 | EVDPIGHLY | A0101 | TRAV12-3 | TRAJ15 | TRAC | TRBV20-1 | None | TRBJ2-7 | TRBC2 |
| TCR392 | EVDPIGHLY | A0101 | TRAV12-3 | TRAJ23 | TRAC | TRBV13 | TRBD1 | TRBJ2-3 | TRBC2 |
| TCR393 | EVDPIGHLY | A0101 | TRAV13-2 | TRAJ9 | TRAC | TRBV7-3 | None | TRBJ1-6 | TRBC1 |
| TCR394 | EVDPIGHLY | A0101 | TRAV21 | TRAJ45 | TRAC | TRBV5-1 | None | TRBJ1-1 | TRBC1 |
| TCR395 | EVDPIGHLY | A0101 | TRAV25 | TRAJ31 | TRAC | TRBV29-1 | TRBD1 | TRBJ1-2 | TRBC1 |
| TCR396 | EVDPIGHLY | A0101 | TRAV34 | TRAJ37 | TRAC | TRBV28 | None | TRBJ1-1 | TRBC1 |
| TCR397 | EVDPIGHLY | A0101 | TRAV1-2 | TRAJ9 | TRAC | TRBV9 | TRBD1 | TRBJ2-6 | TRBC2 |
| TCR398 | EVDPIGHLY | A0101 | TRAV21 | TRAJ36 | TRAC | TRBV9 | TRBD1 | TRBJ2-7 | TRBC2 |
| TCR399 | EVDPIGHLY | A0101 | TRAV12-1 | TRAJ34 | TRAC | TRBV6-1 | None | TRBJ2-7 | TRBC2 |
| TCR400 | EVDPIGHLY | A0101 | TRAV12-1 | TRAJ26 | TRAC | TRBV11-3 | TRBD1 | TRBJ1-1 | TRBC1 |
| TCR401 | EVDPIGHLY | A0101 | TRAV17 | TRAJ36 | TRAC | TRBV5-4 | None | TRBJ2-1 | TRBC2 |
| TCR402 | EVDPIGHLY | A0101 | TRAV21 | TRAJ49 | TRAC | TRBV4-1 | TRBD1 | TRBJ1-1 | TRBC1 |
| TCR403 | EVDPIGHLY | A0101 | TRAV12-1 | TRAJ13 | TRAC | TRBV9 | TRBD2 | TRBJ2-7 | TRBC2 |
| TCR404 | EVDPIGHLY | A0101 | TRAV24 | TRAJ7 | TRAC | TRBV7-9 | TRBD1 | TRBJ2-1 | TRBC2 |
| TCR405 | EVDPIGHLY | A0101 | TRAV21 | TRAJ20 | TRAC | TRBV9 | TRBD2 | TRBJ1-1 | TRBC1 |
| TCR406 | EVDPIGHLY | A0101 | TRAV13-2 | TRAJ49 | TRAC | TRBV6-1 | TRBD1 | TRBJ2-5 | TRBC2 |
| TCR407 | EVDPIGHLY | A0101 | TRAV21 | TRAJ33 | TRAC | TRBV5-5 | TRBD1 | TRBJI-2 | TRBC1 |
| TCR408 | EVDPIGHLY | A0101 | TRAV12-1 | TRAJ39 | TRAC | TRBV4-2 | TRBD2 | TRBJ2-7 | TRBC2 |
| TCR409 | EVDPIGHLY | A0101 | TRAV26-2 | TRAJ30 | TRAC | TRBV9 | TRBD1 | TRBJ2-7 | TRBC2 |
| TCR410 | EVDPIGHLY | A0101 | TRAV20 | TRAJ45 | TRAC | TRBV5-4 | TRBD1 | TRBJ2-7 | TRBC2 |
| TCR411 | EVDPIGHLY | A0101 | TRAV21 | TRAJ31 | TRAC | TRBV7-8 | TRBD2 | TRBJ1-2 | TRBC1 |
| TCR412 | EVDPIGHLY | A0101 | TRAV38-2DV8 | TRAJ48 | TRAC | TRBV2 | TRBD1 | TRBJ1-5 | TRBC1 |
| TCR413 | EVDPIGHLY | A0101 | TRAV25 | TRAJ15 | TRAC | TRBV9 | TRBD1 | TRBJ2-1 | TRBC2 |
| TCR414 | EVDPIGHLY | A0101 | TRAV21 | TRAJ49 | TRAC | TRBV5-4 | None | TRBJ2-7 | TRBC2 |
| TCR415 | EVDPIGHLY | A0101 | TRAV21 | TRAJ12 | TRAC | TRBV27 | TRBD1 | TRBJ2-2 | TRBC2 |
| TCR416 | EVDPIGHLY | A0101 | TRAV38-2DV8 | TRAJ54 | TRAC | TRBV24-1 | None | TRBJ2-2 | TRBC2 |
| TCR417 | EVDPIGHLY | A0101 | TRAV17 | TRAJ52 | TRAC | TRBV27 | None | TRBJ2-1 | TRBC2 |
| TCR418 | EVDPIGHLY | A0101 | TRAV21 | TRAJ28 | TRAC | TRBV9 | TRBD2 | TRBJ2-7 | TRBC2 |
| TCR419 | EVDPIGHLY | A0101 | TRAV21 | TRAJ36 | TRAC | TRBV4-1 | TRBD1 | TRBJ1-1 | TRBC1 |
| TCR420 | EVDPIGHLY | A0101 | TRAV21 | TRAJ31 | TRAC | TRBV5-4 | None | TRBJ1-2 | TRBC1 |
| TCR421 | EVDPIGHLY | A0101 | TRAV21 | TRAJ33 | TRAC | TRBV5-1 | TRBD1 | TRBJ2-3 | TRBC2 |
| TCR422 | EVDPIGHLY | A0101 | TRAV12-1 | TRAJ43 | TRAC | TRBV6-5 | TRBD1 | TRBJ2-7 | TRBC2 |
| TCR423 | EVDPIGHLY | A0101 | TRAV21 | TRAJ41 | TRAC | TRBV9 | None | TRBJ2-2 | TRBC2 |
| TCR424 | EVDPIGHLY | A0101 | TRAV19 | TRAJ40 | TRAC | TRBV20-1 | None | TRBJ2-7 | TRBC2 |
| TCR425 | EVDPIGHLY | A0101 | TRAV12-2 | TRAJ52 | TRAC | TRBV6-1 | TRBD2 | TRBJ2-7 | TRBC1 |
| TCR426 | EVDPIGHLY | A0101 | TRAV26-1 | TRAJ57 | TRAC | TRBV2 | None | TRBJ2-7 | TRBC2 |
| TCR427 | EVDPIGHLY | A0101 | TRAV21 | TRAJ36 | TRAC | TRBV12-4 | TRBD1 | TRBJ1-6 | TRBC1 |
| TCR428 | EVDPIGHLY | A0101 | TRAV8-4 | TRAJ34 | TRAC | TRBV7-9 | None | TRBJ2-7 | TRBC2 |
| TCR429 | EVDPIGHLY | A0101 | TRAV19 | TRAJ32 | TRAC | TRBV7-9 | None | TRBJ1-2 | TRBC2 |
| TCR430 | EVDPIGHLY | A0101 | TRAV21 | TRAJ6 | TRAC | TRBV3-1 | TRBD2 | TRBJ1-4 | TRBC1 |
| TCR431 | EVDPIGHLY | A0101 | TRAV13-2 | TRAJ29 | TRAC | TRBV5-1 | None | TRBJ2-2 | TRBC2 |
| TCR432 | EVDPIGHLY | A0101 | TRAV14DV4 | TRAJ26 | TRAC | TRBV7-9 | TRBD1 | TRBJ2-5 | TRBC2 |
| TCR433 | EVDPIGHLY | A0101 | TRAV35 | TRAJ44 | TRAC | TRBV27 | TRBD1 | TRBJ2-1 | TRBC2 |
| TCR434 | EVDPIGHLY | A0101 | TRAV21 | TRAJ24 | TRAC | TRBV27 | TRBD1 | TRBJ1-6 | TRBC1 |
| TCR435 | EVDPIGHLY | A0101 | TRAV25 | TRAJ21 | TRAC | TRBV28 | TRBD1 | TRBJ2-7 | TRBC2 |
| TCR436 | EVDPIGHLY | A0101 | TRAV3 | TRAJ36 | TRAC | TRBV28 | None | TRBJ1-5 | TRBC1 |
| TCR437 | EVDPIGHLY | A0101 | TRAV26-2 | TRAJ52 | TRAC | TRBV5-6 | TRBD2 | TRBJ2-1 | TRBC2 |
| TCR438 | EVDPIGHLY | A0101 | TRAV8-6 | TRAJ40 | TRAC | TRBV9 | TRBD1 | TRBJ2-7 | TRBC2 |
| TCR439 | EVDPIGHLY | A0101 | TRAV21 | TRAJ42 | TRAC | TRBV28 | TRBD1 | TRBJ2-7 | TRBC2 |
| TCR440 | EVDPIGHLY | A0101 | TRAV12-1 | TRAJ32 | TRAC | TRBV20-1 | TRBD1 | TRBJ1-1 | TRBC1 |
| TCR441 | EVDPIGHLY | A0101 | TRAV24 | TRAJ24 | TRAC | TRBV28 | TRBD2 | TRBJ2-5 | TRBC2 |
| TCR442 | EVDPIGHLY | A0101 | TRAV21 | TRAJ36 | TRAC | TRBV9 | TRBD2 | TRBJ1-1 | TRBC1 |
| TCR443 | EVDPIGHLY | A0101 | TRAV12-1 | TRAJ26 | TRAC | TRBV2 | None | TRBJ1-6 | TRBC1 |
| TCR444 | EVDPIGHLY | A0101 | TRAV21 | TRAJ31 | TRAC | TRBV29-1 | TRBD1 | TRBJ1-1 | TRBC1 |
| TCR445 | EVDPIGHLY | A0101 | TRAV39 | TRAJ33 | TRAC | TRBV6-1 | None | TRBJ1-5 | TRBC1 |
| TCR446 | EVDPIGHLY | A0101 | TRAV3 | TRAJ38 | TRAC | TRBV27 | TRBD2 | TRBJ2-7 | TRBC2 |
| TCR447 | EVDPIGHLY | A0101 | TRAV10 | TRAJ33 | TRAC | TRBV30 | TRBD2 | TRBJ2-1 | TRBC2 |
| TCR448 | EVDPIGHLY | A0101 | TRAV21 | TRAJ20 | TRAC | TRBV2 | TRBD1 | TRBJ2-1 | TRBC2 |
| TCR449 | EVDPIGHLY | A0101 | TRAV13-1 | TRAJ20 | TRAC | TRBV5-1 | TRBD1 | TRBJ1-1 | TRBC1 |
| TCR450 | EVDPIGHLY | A0101 | TRAV27 | TRAJ45 | TRAC | TRBV27 | TRBD1 | TRBJ1-6 | TRBC1 |
| TCR451 | EVDPIGHLY | A0101 | TRAV21 | TRAJ18 | TRAC | TRBV9 | TRBD1 | TRBJ2-1 | TRBC2 |
| TCR452 | EVDPIGHLY | A0101 | TRAV26-2 | TRAJ28 | TRAC | TRBV27 | None | TRBJ1-5 | TRBC1 |
| TCR453 | EVDPIGHLY | A0101 | TRAV12-1 | TRAJ34 | TRAC | TRBV9 | TRBD2 | TRBJ2-7 | TRBC2 |
| TCR454 | EVDPIGHLY | A0101 | TRAV13-2 | TRAJ40 | TRAC | TRBV4-1 | None | TRBJ1-3 | TRBC1 |
| TCR455 | EVDPIGHLY | A0101 | TRAV12-1 | TRAJ34 | TRAC | TRBV4-2 | TRBD2 | TRBJ2-7 | TRBC2 |
| TCR456 | EVDPIGHLY | A0101 | TRAV13-2 | TRAJ46 | TRAC | TRBV7-9 | TRBD1 | TRBJ2-1 | TRBC2 |
| TCR457 | EVDPIGHLY | A0101 | TRAV21 | TRAJ36 | TRAC | TRBV9 | TRBD2 | TRBJ2-7 | TRBC2 |
| TCR458 | EVDPIGHLY | A0101 | TRAV1-2 | TRAJ20 | TRAC | TRBV11-3 | TRBD1 | TRBJ2-3 | TRBC2 |
| TCR459 | EVDPIGHLY | A0101 | TRAV3 | TRAJ6 | TRAC | TRBV12-4 | TRBD1 | TRBJ2-2 | TRBC2 |
| TCR460 | EVDPIGHLY | A0101 | TRAV25 | TRAJ32 | TRAC | TRBV19 | TRBD1 | TRBJ1-1 | TRBC1 |
| TCR461 | EVDPIGHLY | A0101 | TRAV21 | TRAJ33 | TRAC | TRBV9 | TRBD1 | TRBJ1-1 | TRBC1 |
| TCR462 | EVDPIGHLY | A0101 | TRAV19 | TRAJ53 | TRAC | TRBV7-7 | TRBD1 | TRBJ2-1 | TRBC2 |
| TCR463 | EVDPIGHLY | A0101 | TRAV12-1 | TRAJ20 | TRAC | TRBV10-3 | TRBD2 | TRBJ2-3 | TRBC2 |
| TCR464 | EVDPIGHLY | A0101 | TRAV12-1 | TRAJ34 | TRAC | TRBV6-5 | TRBD1 | TRBJ2-7 | TRBC2 |
| TCR465 | EVDPIGHLY | A0101 | TRAV26-2 | TRAJ43 | TRAC | TRBV25-1 | TRBD1 | TRBJ1-2 | TRBC1 |
| TCR466 | EVDPIGHLY | A0101 | TRAV8-6 | TRAJ20 | TRAC | TRBV7-9 | TRBD1 | TRBJ2-2 | TRBC2 |
| TCR467 | EVDPIGHLY | A0101 | TRAV3 | TRAJ18 | TRAC | TRBV20-1 | TRBD2 | TRBJ2-1 | TRBC2 |
| TCR468 | EVDPIGHLY | A0101 | TRAV21 | TRAJ40 | TRAC | TRBV11-3 | TRBD1 | TRBJ1-2 | TRBC1 |
| TCR469 | EVDPIGHLY | A0101 | TRAV2 | TRAJ10 | TRAC | TRBV6-5 | TRBD2 | TRBJ2-7 | TRBC2 |

[0683] V(D)J and CDR3 sequences of a and 3 chains of the TCR clonotypes specific for A*0101_EVDPHIGHLY are shown in Table 10.

[0684] Annotated variable, diversity, joining, and constant regions of TCR clonotypes that demonstrated confirmed specificity in recipient T-cells is shown in Table 11, below.

TABLE 11
annotated TCR sequences from unique TCRs with confirmed specificity in
recipient T cells.

| TCR | | | | | | | | | |
|---|---|---|---|---|---|---|---|---|---|
| Clonotype | | | | | | | | | |
| ID # | PEPTIDE | HLA | TRAV | TRAJ | TRAC | TRBV | TRBD | TRBJ | TRBC |
| TCR2 | EVDPIGHLY | A0101 | TRAV24 | TRAJ31 | TRAC | TRBV3-1 | TRBD1 | TRBJ2-1 | TRBC |
| | | | | | | | | | 2 |
| TCR4 | EVDPIGHLY | A0101 | TRAV3 | TRAJ6 | TRAC | TRBV19 | None | TRBJ2-1 | TRBC |
| | | | | | | | | | 1 |
| TCR53 | EVDPIGHLY | A0101 | TRAV21 | TRAJ26 | TRAC | TRBV27 | TRBD1 | TRBJ1-6 | TRBC |
| | | | | | | | | | 1 |
| TCR54 | EVDPIGHLY | A0101 | TRAV20 | TRAJ15 | TRAC | TRBV27 | None | TRBJ2-3 | TRBC |
| | | | | | | | | | 2 |
| TCR19 | LLASSILCA | A0201 | TRAV19 | TRAJ4 | TRAC | TRBV6-5 | TRBD2 | TRBJ2-7 | TRBC |
| | | | | | | | | | 1 |
| TCR21 | LLASSILCA | A0201 | TRAV5 | TRAJ13 | TRAC | TRBV7-9 | TRBD1 | TRBJ2-7 | TRBC |
| | | | | | | | | | 2 |
| TCR22 | LLASSILCA | A0201 | TRAV3 | TRAJ39 | TRAC | TRBV7-9 | None | TRBJ2-2 | TRBC |
| | | | | | | | | | 2 |
| TCR18 | LLASSILCA | A0201 | TRAV38- | TRAJ21 | TRAC | TRBV9 | TRBD1 | TRBJ2-1 | TRBC |
| | | | 2DV8 | | | | | | 2 |
| TCR23 | LLASSILCA | A0201 | TRAV4 | TRAJ9 | TRAC | TRBV27 | None | TRBJ1-5 | TRBC |
| | | | | | | | | | 1 |
| TCR26 | GVYDGEEHSV | A0201 | TRAV13-1 | TRAJ11 | TRAC | TRBV6-3 | None | TRBJ2-1 | TRBC |
| | | | | | | | | | 2 |
| TCR28 | GVYDGEEHSV | A0201 | TRAV14DV4 | TRAJ54 | TRAC | TRBV4-3 | TRBD1 | TRBJ2-4 | TRBC |
| | | | | | | | | | 2 |
| TCR29 | GEMSSNSTAL | B4402 | TRAV19 | TRAJ39 | TRAC | TRBV7-6 | TRBD1 | TRBJ1-1 | TRBC |
| | | | | | | | | | 1 |
| TCR30 | GEMSSNSTAL | B4402 | TRAV36DV7 | TRAJ34 | TRAC | TRBV7-6 | TRBD2 | TRBJ2-2 | TRBC |
| | | | | | | | | | 2 |
| TCR32 | GEMSSNSTAL | B4402 | TRAV24 | TRAJ15 | TRAC | TRBV7-6 | TRBD2 | TRBJ2-1 | TRBC |
| | | | | | | | | | 2 |
| TCR33 | GEMSSNSTAL | B4402 | TRAV8-4 | TRAJ12 | TRAC | TRBV12- | TRBD2 | TRBJ2-3 | TRBC |
| | | | | | | 4 | | | 2 |

[0685] V(D)J and CDR3 sequences of α and β chains of TCR clonotypes that demonstrated confirmed specificity in recipient T-cells is shown in Table 12.

[0686] A table of the annotated reference a variable (TRAV), α joining (TRAJ), α constant (TRAC), β variable (TRBV), β diversity (TRBD), β joining (TRBJ), and β constant (TRBC) sequences and their corresponding Ensembl transcript (ENST) reference number is shown in Table 13. For any of the TCRs disclosed, amino acid sequences that are at least 95%, at least 96%, at least 97%, and least 98%, at least 99%, or more than 99% identical to the the annotated reference sequences as disclosed in Tables 9 and 11 are encompassed in the invention.

TABLE 13
Annotated reference genes for alpha and beta TCR regions

| Gene | Ensemble Transcript ID |
|---|---|
| TRAC | ENST00000636588, ENST00000637010, ENST00000611116, |
| | ENST00000636320, ENST00000616778 |
| TRAJ1 | ENST00000390536 |
| TRAJ10 | ENST00000390527 |
| TRAJ11 | ENST00000390526 |
| TRAJ12 | ENST00000390525 |
| TRAJ13 | ENST00000390524 |
| TRAJ14 | ENST00000390523 |
| TRAJ15 | TENX_TRAJ15 (10X internal ref #) |
| TRAJ16 | ENST00000390521 |
| TRAJ17 | ENST00000390520 |
| TRAJ18 | ENST00000390519 |
| TRAJ19 | ENST00000390518 |
| TRAJ2 | ENST00000390535 |
| TRAJ20 | ENST00000390517 |
| TRAJ21 | ENST00000390516 |
| TRAJ22 | ENST00000390515 |
| TRAJ23 | ENST00000390514 |
| TRAJ24 | ENST00000390513 |
| TRAJ25 | ENST00000390512 |
| TRAJ26 | ENST00000390511 |
| TRAJ27 | ENST00000390510 |
| TRAJ28 | ENST00000390509 |
| TRAJ29 | ENST00000390508 |
| TRAJ3 | ENST00000390534 |
| TRAJ30 | ENST00000390507 |
| TRAJ31 | ENST00000390506 |
| TRAJ32 | ENST00000390505 |
| TRAJ33 | ENST00000390504 |
| TRAJ34 | ENST00000390503 |
| TRAJ35 | ENST00000390502 |
| TRAJ36 | ENST00000614481 |
| TRAJ37 | ENST00000612375 |
| TRAJ38 | ENST00000390499 |
| TRAJ39 | ENST00000390498 |
| TRAJ4 | ENST00000390533 |
| TRAJ40 | ENST00000390497 |
| TRAJ41 | ENST00000390496 |
| TRAJ42 | ENST00000390495 |
| TRAJ43 | ENST00000390494 |
| TRAJ44 | ENST00000390493 |
| TRAJ45 | ENST00000390492 |
| TRAJ46 | ENST00000390491 |
| TRAJ47 | ENST00000390490 |
| TRAJ48 | ENST00000390489 |
| TRAJ49 | ENST00000390488 |
| TRAJ5 | ENST00000390532 |
| TRAJ50 | ENST00000390487 |
| TRAJ52 | ENST00000390486 |
| TRAJ53 | ENST00000390485 |
| TRAJ54 | ENST00000390484 |
| TRAJ56 | ENST00000390483 |
| TRAJ57 | ENST00000390482 |
| TRAJ58 | ENST00000390481 |
| TRAJ59 | ENST00000390480 |
| TRAJ6 | ENST00000390531 |
| TRAJ61 | ENST00000390479 |
| TRAJ7 | ENST00000390530 |
| TRAJ8 | ENST00000390529 |
| TRAJ9 | ENST00000390528 |
| TRAV1-1 | ENST00000542354 |
| TRAV1-2 | ENST00000390423 |
| TRAV10 | ENST00000390432 |
| TRAV12-1 | ENST00000390433 |
| TRAV12-2 | ENST00000390437 |
| TRAV12-3 | ENST00000390442 |
| TRAV13-1 | ENST00000390436 |
| TRAV13-2 | ENST00000390439 |
| TRAV14DV4 | ENST00000390440 |
| TRAV16 | ENST00000390444 |
| TRAV17 | ENST00000390445 |
| TRAV18 | ENST00000390446 |
| TRAV19 | ENST00000390447 |
| TRAV2 | ENST00000390424 |
| TRAV20 | ENST00000390448 |
| TRAV21 | ENST00000390449 |
| TRAV22 | ENST00000390450 |
| TRAV23DV6 | ENST00000390451 |
| TRAV24 | ENST00000390453 |
| TRAV25 | ENST00000390454 |
| TRAV26-1 | ENST00000390455 |
| TRAV26-2 | ENST00000390460 |
| TRAV27 | ENST00000390457 |
| TRAV29DV5 | ENST00000390458 |
| TRAV3 | ENST00000390425 |
| TRAV30 | ENST00000557168 |
| TRAV34 | ENST00000390461 |
| TRAV35 | TENX_TRAV35 (10X internal ref #) |
| TRAV36DV7 | ENST00000390463 |
| TRAV38-1 | ENST00000390464 |
| TRAV38-2DV8 | ENST00000390465 |
| TRAV39 | ENST00000390466 |
| TRAV4 | ENST00000390426 |
| TRAV40 | ENST00000390467 |
| TRAV41 | ENST00000390468 |
| TRAV5 | ENST00000390427 |
| TRAV6 | ENST00000390428 |
| TRAV7 | ENST00000390429 |
| TRAV8-1 | ENST00000390430 |
| TRAV8-2 | ENST00000390434 |
| TRAV8-3 | ENST00000390435 |
| TRAV8-4 | ENST00000390438 |
| TRAV8-6 | ENST00000390443 |
| TRAV8-7 | ENST00000390456 |
| TRAV9-1 | ENST00000390431 |
| TRAV9-2 | ENST00000390441 |
| TRBC1 | ENST00000632136, ENST00000633705 |
| TRBC2 | ENST00000636844, ENST00000614992, ENST00000622053, |
| | ENST00000613720, ENST00000466254, ENST00000637077, |
| | ENST00000610416, ENST00000620987 |
| TRBD1 | ENST00000631435 |
| TRBD2 | TENX_TRBD2 (10X internal ref #) |
| TRBJ1-1 | ENST00000632951 |
| TRBJ1-2 | ENST00000631745 |
| TRBJ1-3 | ENST00000633936 |
| TRBJ1-4 | ENST00000632041 |
| TRBJ1-5 | ENST00000634000 |
| TRBJ1-6 | ENST00000633713, ENST00000632228 |
| TRBJ2-1 | ENST00000631600 |
| TRBJ2-2 | ENST00000633188 |
| TRBJ2-2P | ENST00000633209 |
| TRBJ2-3 | ENST00000631840 |
| TRBJ2-4 | ENST00000390416 |
| TRBJ2-5 | ENST00000634149 |
| TRBJ2-6 | ENST00000632996 |
| TRBJ2-7 | ENST00000390419, ENST00000633660 |
| TRBV10-1 | ENST00000390364 |
| TRBV10-2 | ENST00000426318, ENST00000633575 |
| TRBV10-3 | ENST00000611462, ENST00000631471 |
| TRBV11-1 | ENST00000390367 |
| TRBV11-2 | TENX_TRBV11_2 (10X internal ref #) |
| TRBV11-3 | ENST00000634111 |
| TRBV12-3 | ENST00000633292 |
| TRBV12-4 | ENST00000631824, ENST00000617347 |
| TRBV12-5 | ENST00000632829, ENST00000621184 |
| TRBV13 | ENST00000633796 |
| TRBV14 | ENST00000617639 |
| TRBV15 | ENST00000631835 |
| TRBV16 | ENST00000633244 |
| TRBV17 | ENST00000619103, ENST00000631663 |
| TRBV18 | ENST00000611520, ENST00000631559 |
| TRBV19 | ENST00000390393, ENST00000632638 |
| TRBV2 | ENST00000632828, ENST00000455382 |
| TRBV20-1 | ENST00000390394, ENST00000633466 |
| TRBV21-1 | TENXT_RBV21 (10X internal ref #) |
| TRBV23-1 | ENST00000390396 |
| TRBV24-1 | ENST00000633092, ENST00000390397 |
| TRBV25-1 | ENST00000390398, ENST00000610439 |
| TRBV27 | ENST00000633283 |
| TRBV28 | ENST00000390400 |
| TRBV29-1 | ENST00000422143 |
| TRBV3-1 | ENST00000390387 |
| TRBV30 | ENST00000631690, ENST00000417977 |
| TRBV4-1 | ENST00000632713, ENST00000390357 |
| TRBV4-2 | ENST00000390392 |
| TRBV4-3 | ENST00000631427 |
| TRBV5-1 | ENST00000633384 |
| TRBV5-3 | ENST00000390362, ENST00000634123 |
| TRBV5-4 | ENST00000633696, ENST00000454561 |
| TRBV5-5 | ENST00000632187, ENST00000390372 |
| TRBV5-6 | ENST00000390375 |
| TRBV5-7 | ENST00000633790 |
| TRBV5-8 | ENST00000631639 |
| TRBV6-1 | ENST00000631557 |
| TRBV6-2 | ENST00000632016 |
| TRBV6-3 | ENST00000632148 |
| TRBV6-4 | ENST00000390360, ENST00000633472 |
| TRBV6-5 | ENST00000633072 |
| TRBV6-6 | ENST00000633963, ENST00000390371 |
| TRBV6-7 | ENST00000631511, ENST00000390373 |
| TRBV6-8 | ENST00000632425, ENST00000390376 |
| TRBV6-9 | ENST00000634093 |
| TRBV7-1 | ENST00000632308 |
| TRBV7-2 | ENST00000634605 |
| TRBV7-3 | ENST00000390361, ENST00000631882 |
| TRBV7-4 | ENST00000633313, ENST00000390359 |
| TRBV7-6 | ENST00000390374, ENST00000633265 |
| TRBV7-7 | ENST00000631548 |
| TRBV7-8 | ENST00000632560 |
| TRBV7-9 | ENST00000612787, ENST00000632021 |
| TRBV9 | ENST00000633328, ENST00000390363 |

### Example 13: T Cell Line Transiently Transfected with Identified TCRs Specifically Bind to their Target HLA-PEPTIDE Complex, but not to Negative Control Peptide-HLAs

[0687] Jurkat TIB-152 T cell line cultures were co-transfected with a plasmid expressing human CD8 and a plasmid expressing TCR α and β chains with a GFP reporter gene using Nucleofector 4D electroporator. Plasmids used for transfection are described in FIGS. 4 and 5. 24-48 hours post transfection, Jurkat T cells were analyzed for expression of the TCR of interest. Cells were assessed for binding to HLA-PEPTIDE complexes and a control infectious-disease-based peptide tetramer using flow cytometry. Total population was gated on live single GFP-expressing cells before evaluating binding of HLA-PEPTIDE target tetramer. FIG. 31 shows examples of Jurkat cells expressing A*0201_LLASSILCA-, A*0201_GVYDGEEHSV-, B*4402_GEMSSNSTAL-, and A*0101_EVDPIGHLY-specific TCRs binding to their respective HLA-PEPTIDE targets but not to the control peptide tetramer.

### Example 14: TCRs Cloned into a Viral Vector are Stably Expressed in Primary Human CD8+ T Cells and Bind Cognate Peptide Target-MHC Complexes

[0688] Lentiviral vectors were generated for TCR specific for the HLA-PEPTIDE target HLA-A*0201_LLASSILCA. As a model vector system, we used commercially available 3^{rd} generation lentivirus base expression vector system from System Biosciences, Palo Alto, Calif. See FIG. 33.

[0689] Primary human CD8+ T cells were isolated and transduced with the recombinant TCR lentivirus at multiplicity of infection (MOI˜10). T cells were expanded using rapid expansion protocol for 1-2 weeks before assessment of TCR expression on CD8 T cells by tetramer staining.

[0690] FIG. 32 depicts the gating strategy and flow data demonstrating that transduced human CD8+ cells bind to the HLA-PEPTIDE target.

### Example 15: Identification of MHC/Peptide Target-Reactive TCRs

[0691] T cells are isolated from blood, lymph nodes, or tumors of patients. Patients are HLA-matched to SAT, and are selected based on expression of target-harboring protein. T cells are then enriched for SAT-specific T cells, e.g., by sorting SAT-MHC tetramer binding cells or by sorting activated cells stimulated in an in vitro co-culture of T cells and SAT-pulsed antigen presenting cells.

[0692] SAT-relevant alpha-beta TCR dimers are identified by single cell sequencing of TCRs of SAT-specific T cells. Alternatively, bulk TCR sequencing of SAT-specific T cells is performed and alpha-beta pairs with a high probability of matching are determined using a TCR pairing method.

[0693] Alternatively or in addition, SAT-specific T cells can be obtained through in vitro priming of naïve T cells from healthy donors. T cells obtained from PBMCs, lymph nodes, or cord blood are repeatedly stimulated by SAT-pulsed antigen presenting cells to prime differentiation of antigen-experienced T cells. TCRs are then identified similarly as described above for SAT-specific T cells from patients.

### Example 16: Production of Engineered TCR T Cells

[0694] TCR alpha and beta chain sequences are cloned into appropriate constructs. TCR-autologous or heterologous bulk T cells are transduced with the constructs to produce engineered TCR T cells. These T cells are expanded in the presence of anti-CD3 antibodies and IL-2 cytokine for use in subsequent experiments. In certain instances, native TCR is deleted or the inserted TCR is modified to increase proper multimerization.

[0695] In Vitro Verification of TCR Specificity

[0696] First, T cells bearing engineered TCRs are screened for target recognition using antigen presenting cells expressing the appropriate MHC and pulsed with appropriate target(s).

[0697] TCRs identified in the first round of screening are then tested for recognition of natural target. Lead TCRs are nominated based on specific recognition of HLA-matched primary tumors and tumor cell lines expressing SAT-harboring protein.

[0698] To assure specificity, lead TCRs are de-selected based on off-target recognition. They are screened against a panel of HLA matched and mismatched cell lines, covering multiple tissues and organ types, and with HLA-matched and mismatched antigen presenting cells pulsed with a panel of infectious disease antigens. TCRs with specific and non-specific off-target recognition of self-antigens or common non-self-antigens are de-selected.

### Example 17: Identification of Monoclonal Antibodies (mAbs) that Target MHC Class I Molecules Presenting Tumor Antigens Using Rabbit B Cell Cloning Technologies

[0699] Potent and selective mAbs targeting human class I MHC molecules presenting tumor antigens of interest are identified. Soluble human pMHC molecules presenting human tumor antigens are utilized for multiple mouse or rabbit immunizations followed by screening of B cells derived from the immunized animals to identify B cells that express mAbs that bind to target class I MHC molecules. Sequences encoding the mAbs identified from the mouse or rabbit screens will be cloned from the isolated B cells. The recovered mAbs are then evaluated against a panel of irrelevant pMHCs to identify lead mAbs that bind selectively to the target pMHCs. Lead mAbs will be fully characterized to determine target binding affinity and selectivity. Lead mAbs that demonstrate potent and selective binding are humanized to generate full-length human IgG monoclonal antibody (mAb) constructs. In addition, the lead mAbs are incorporated into bi-specific mAb constructs and chimeric antigen receptor (CAR) constructs that can be used to generate CAR T-cells. Full-length bi-specifics or scFV-based bi-specifics can be constructed.

[0700] Demonstrate Targeting of Human Tumor Cells In Vitro

[0701] Immunohistochemistry techniques are utilized to demonstrate specific binding of lead antibodies to human tumor cells expressing target pMHC molecules. T-cell lines transfected with CAR-T constructs are incubated with human tumor cells to demonstrate killing of tumor cells in vitro. Alternatively, tumor cells expressing the target are incubated with bi-specific constructs (encoding the ABP and an effector domain) and PBMCs or T cells.

[0702] In Vivo Proof-of-Concept

[0703] Lead antibody or CAR-T constructs are evaluated in vivo to demonstrate directed tumor killing in humanized mouse tumor models. Lead antibody or CAR-T constructs are evaluated in xenograft tumor models engrafted with human PBMCs. Anti-tumor activity is measured and compared to control constructs to demonstrate target-dependent tumor killing.

[0704] Potent and selective ABPs that selectively target human class I MHC molecules presenting tumor antigens will be identified using phage display or B cell cloning technologies. The utility of the ABPs will be demonstrated by showing that the ABPs mediated tumor cell killing in vitro and in vivo when incorporated into antibody or CAR-T cell constructs.

[0705] While the invention has been particularly shown and described with reference to a preferred embodiment and various alternate embodiments, it will be understood by persons skilled in the relevant art that various changes in form and details can be made therein without departing from the spirit and scope of the invention.

[0706] All references, issued patents and patent applications cited within the body of the instant specification are hereby incorporated by reference in their entirety, for all purposes.

### SEQUENCES

TABLE 3
VH and VL sequences for G2 scFv Selective
Binders, selective for HLA-PEPTIDE Target
HLA-A*01:01 NTDNNLAVY (SEQ ID NO: 23).

| Target group | Clone name | VH (SEQ ID NO) | VL (SEQ ID NO) |
|---|---|---|---|
| G2 | G2-P2E07 | 2781 | 2816 |
| G2 | G2-P2E03 | 2782 | 2817 |
| G2 | G2-P2A11 | 2783 | 2818 |
| G2 | G2-P2C06 | 2784 | 2819 |
| G2 | G2-P1G01 | 2785 | 2820 |
| G2 | G2-P1C02 | 2786 | 2821 |
| G2 | G2-P1H01 | 2787 | 2822 |
| G2 | G2-P1B12 | 2788 | 2823 |
| G2 | G2-P1B06 | 2789 | 2824 |
| G2 | G2-P2H10 | 2790 | 2825 |
| G2 | G2-P1H10 | 2791 | 2826 |
| G2 | G2-P2C11 | 2792 | 2827 |
| G2 | G2-P1C09 | 2793 | 2828 |
| G2 | G2-P1A10 | 2794 | 2829 |
| G2 | G2-P1B10 | 2795 | 2830 |
| G2 | G2-P1D07 | 2796 | 2831 |
| G2 | G2-P1E05 | 2797 | 2832 |
| G2 | G2-P1D03 | 2798 | 2833 |
| G2 | G2-P1G12 | 2799 | 2834 |
| G2 | G2-P2H11 | 2800 | 2835 |
| G2 | G2-P1C03 | 2801 | 2836 |
| G2 | G2-P1G07 | 2802 | 2837 |
| G2 | G2-P1F12 | 2803 | 2838 |
| G2 | G2-P1G03 | 2804 | 2839 |
| G2 | G2-P2B08 | 2805 | 2840 |
| G2 | G2-P2A10 | 2806 | 2841 |
| G2 | G2-P2D04 | 2807 | 2842 |
| G2 | G2-P1C06 | 2808 | 2843 |
| G2 | G2-P2A09 | 2809 | 2844 |
| G2 | G2-P1B08 | 2810 | 2845 |
| G2 | G2-P1E03 | 2811 | 2846 |
| G2 | G2-P2A03 | 2812 | 2847 |
| G2 | G2-P2F01 | 2813 | 2848 |
| G2 | G2-P1H11 | 2814 | 2849 |
| G2 | G2-P1D06 | 2815 | 2850 |

TABLE 4
CDR sequences for G2 selective binders, selective for HLA-PEPTIDE
Target HLA-A*01:01 NTDNNLAVY (SEQ ID NO: 23)
(determined according to Kabat numbering)

| | | CDR- | CDR- | CDR- | CDR- | CDR- | CDR- |
|---|---|---|---|---|---|---|---|
| Tar- | | H1 | H2 | H3 | L1 | L2 | L3 |
| get | Clone | (SEQ | (SEQ | (SEQ | (SEQ | (SEQ | (SEQ |
| group | name | ID NO) | ID NO) | ID NO) | ID NO) | ID NO) | ID NO) |
| G2 | G2-P2E07 | 2851 | 2880 | 2902 | 2934 | 2955 | 2971 |
| G2 | G2-P2E03 | 2852 | 2881 | 2903 | 2935 | 2956 | 2972 |
| G2 | G2-P2A11 | 2853 | 2882 | 2903 | 2936 | 2957 | 2973 |
| G2 | G2-P2C06 | 2854 | 2882 | 2904 | 2937 | 2958 | 2974 |
| G2 | G2-P1G01 | 2855 | 2883 | 2905 | 2937 | 2958 | 2975 |
| G2 | G2-P1C02 | 2855 | 2882 | 2906 | 2938 | 2958 | 2976 |
| G2 | G2-P1H01 | 2856 | 2882 | 2907 | 2939 | 2959 | 2976 |
| G2 | G2-P1B12 | 2857 | 2882 | 2908 | 2940 | 2960 | 2977 |
| G2 | G2-P1B06 | 2858 | 2884 | 2909 | 2935 | 2958 | 2972 |
| G2 | G2-P2H10 | 2859 | 2882 | 2910 | 2941 | 2961 | 2978 |
| G2 | G2-P1H10 | 2852 | 2885 | 2911 | 2942 | 2958 | 2976 |
| G2 | G2-P2C11 | 2860 | 2882 | 2912 | 2943 | 2962 | 2978 |
| G2 | G2-P1C09 | 2861 | 2886 | 2913 | 2944 | 2963 | 2979 |
| G2 | G2-P1A10 | 2862 | 2887 | 2914 | 2945 | 2958 | 2980 |
| G2 | G2-P1B10 | 2855 | 2888 | 2903 | 2941 | 2962 | 2981 |
| G2 | G2-P1D07 | 2855 | 2889 | 2915 | 2946 | 2958 | 2982 |
| G2 | G2-P1E05 | 2863 | 2883 | 2916 | 2947 | 2958 | 2973 |
| G2 | G2-P1D03 | 2856 | 2890 | 2917 | 2934 | 2962 | 2972 |
| G2 | G2-P1G12 | 2864 | 2891 | 2917 | 2946 | 2964 | 2972 |
| G2 | G2-P2H11 | 2865 | 2882 | 2918 | 2941 | 2962 | 2974 |
| G2 | G2-P1C03 | 2866 | 2882 | 2919 | 2948 | 2958 | 2983 |
| G2 | G2-P1G07 | 2867 | 2892 | 2920 | 2946 | 2962 | 2984 |
| G2 | G2-P1F12 | 2868 | 2893 | 2921 | 2949 | 2965 | 2972 |
| G2 | G2-P1G03 | 2869 | 2894 | 2922 | 2950 | 2966 | 2985 |
| G2 | G2-P2B08 | 2870 | 2882 | 2923 | 2943 | 2967 | 2986 |
| G2 | G2-P2A10 | 2871 | 2895 | 2924 | 2951 | 2968 | 2987 |
| G2 | G2-P2D04 | 2872 | 2882 | 2925 | 2952 | 2969 | 2973 |
| G2 | G2-P1C06 | 2873 | 2882 | 2926 | 2943 | 2958 | 2988 |
| G2 | G2-P2A09 | 2852 | 2882 | 2927 | 2935 | 2958 | 2989 |
| G2 | G2-P1B08 | 2874 | 2896 | 2928 | 2938 | 2958 | 2981 |
| G2 | G2-P1E03 | 2875 | 2897 | 2929 | 2953 | 2961 | 2990 |
| G2 | G2-P2A03 | 2876 | 2898 | 2930 | 2941 | 2962 | 2989 |
| G2 | G2-P2F01 | 2877 | 2899 | 2931 | 2946 | 2964 | 2991 |
| G2 | G2-P1H11 | 2878 | 2900 | 2932 | 2946 | 2958 | 2992 |
| G2 | G2-P1D06 | 2879 | 2901 | 2933 | 2954 | 2970 | 2993 |

TABLE 5
VH and VL sequences for scFv selective binders selective for
HLA-PEPTIDE Target HLA-A*02:01 LLASSILCA (SEQ ID NO: 2737).

| Target group | Clone name | VH (SEQ ID NO) | VL (SEQ ID NO) |
|---|---|---|---|
| G7 | G7R3-P1C6 | 2994 | 3002 |
| G7 | G7R3-P1G10 | 2995 | 3003 |
| G7 | 1-G7R3-P1B4 | 2996 | 3004 |
| G7 | 2-G7R4-P2C2 | 2997 | 3005 |
| G7 | 3-G7R4-P1A3 | 2998 | 3006 |
| G7 | 4-G7R4-B5-P2E9 | 2999 | 3007 |
| G7 | 5-G7R4-B10-P1F8 | 3000 | 3008 |
| G7 | B7 (G7R3-P3A9) | 3001 | 3009 |

TABLE 6
CDR sequences for G7 selective binders selective for HLA-PEPTIDE
Target HLA-A*02:01 LLASSILCA (SEQ ID NO: 2737)

| | | CDR- | CDR- | CDR- | CDR- | CDR- | CDR- |
|---|---|---|---|---|---|---|---|
| Tar- | | H1 | H2 | H3 | L1 | L2 | L3 |
| get | Clone | (SEQ | (SEQ | (SEQ | (SEQ | (SEQ | (SEQ |
| group | name | ID NO) | ID NO) | ID NO) | ID NO) | ID NO) | ID NO) |
| G7 | G7R3- | 3010 | 3017 | 3025 | 3033 | 2970 | 3043 |
| | P1C6 | | | | | | |
| G7 | G7R3- | 3011 | 3018 | 3026 | 3034 | 2958 | 3044 |
| | P1G10 | | | | | | |
| G7 | 1-G7R3- | 3012 | 3019 | 3027 | 3035 | 3039 | 3045 |
| | P1B4 | | | | | | |
| G7 | 2-G7R4- | 3013 | 3020 | 3028 | 3036 | 2962 | 3046 |
| | P2C2 | | | | | | |
| G7 | 3-G7R4- | 2879 | 3021 | 3029 | 2934 | 3040 | 3047 |
| | P1A3 | | | | | | |
| G7 | 4-G7R4- | 3014 | 3022 | 3030 | 3037 | 3041 | 3048 |
| | B5-P2E9 | | | | | | |
| G7 | 5-G7R4- | 3015 | 3023 | 3031 | 2946 | 3042 | 3049 |
| | B10-P1F8 | | | | | | |
| G7 | B7 | 3016 | 3024 | 3032 | 3038 | 3041 | 3050 |
| | (G7R3- | | | | | | |
| | P3 A9) | | | | | | |

CDR3 and V(D)J sequences of TCR clonotypes confirmed through resorting

| | | | ALPHA | | FULL LENGTH | FULL LENGTH |
|---|---|---|---|---|---|---|
| TCR ID | | | CDR3 (SEQ | BETA CDR3 | ALPHA VJ (SEQ | BETA V(D)J |
| # | PEPTIDE | HLA | ID NO) | (SEQ ID NO) | ID NO) | (SEQ ID NO) |
| TCR101 | EVDPIGHLY (SEQ | A0101 | 3052 | 3351 | 3656 | 3962 |
| | ID NO: 3051) | | | | | |
| TCR102 | EVDPIGHLY (SEQ | A0101 | 3053 | 3352 | 3657 | 3963 |
| | ID NO: 3051) | | | | | |
| TCR103 | EVDPIGHLY (SEQ | A0101 | 3054 | 3353 | 3658 | 3964 |
| | ID NO: 3051) | | | | | |
| TCR104 | EVDPIGHLY (SEQ | A0101 | 3052 | 3352 | 3659 | 3963 |
| | ID NO: 3051) | | | | | |
| TCR105 | EVDPIGHLY (SEQ | A0101 | 3055 | 3354 | 3660 | 3965 |
| | ID NO: 3051) | | | | | |
| TCR106 | EVDPIGHLY (SEQ | A0101 | 3056 | 3355 | 3661 | 3966 |
| | ID NO: 3051) | | | | | |
| TCR107 | EVDPIGHLY (SEQ | A0101 | 3057 | 3356 | 3662 | 3967 |
| | ID NO: 3051) | | | | | |
| TCR108 | EVDPIGHLY (SEQ | A0101 | 3058 | 3357 | 3663 | 3968 |
| | ID NO: 3051) | | | | | |
| TCR109 | EVDPIGHLY (SEQ | A0101 | 3059 | 3358 | 3664 | 3969 |
| | ID NO: 3051) | | | | | |
| TCR110 | EVDPIGHLY (SEQ | A0101 | 3060 | 3359 | 3665 | 3970 |
| | ID NO: 3051) | | | | | |
| TCR111 | EVDPIGHLY (SEQ | A0101 | 3061 | 3360 | 3666 | 3971 |
| | ID NO: 3051) | | | | | |
| TCR112 | EVDPIGHLY (SEQ | A0101 | 3062 | 3361 | 3667 | 3972 |
| | ID NO: 3051) | | | | | |
| TCR113 | EVDPIGHLY (SEQ | A0101 | 3063 | 3362 | 3668 | 3973 |
| | ID NO: 3051) | | | | | |
| TCR114 | EVDPIGHLY (SEQ | A0101 | 3053 | 3351 | 3657 | 3962 |
| | ID NO: 3051) | | | | | |
| TCR115 | EVDPIGHLY (SEQ | A0101 | 3057 | 3352 | 3662 | 3963 |
| | ID NO: 3051) | | | | | |
| TCR1I6 | EVDPIGHLY (SEQ | A0101 | 3064 | 3363 | 3669 | 3974 |
| | ID NO: 3051) | | | | | |
| TCR1I7 | EVDPIGHLY (SEQ | A0101 | 3065 | 3364 | 3670 | 3975 |
| | ID NO: 3051) | | | | | |
| TCR118 | EVDPIGHLY (SEQ | A0101 | 3054 | 3352 | 3658 | 3963 |
| | ID NO: 3051) | | | | | |
| TCR119 | EVDPIGHLY (SEQ | A0101 | 3066 | 3365 | 3671 | 3976 |
| | ID NO: 3051) | | | | | |
| TCR120 | EVDPIGHLY (SEQ | A0101 | 3067 | 3366 | 3672 | 3977 |
| | ID NO: 3051) | | | | | |
| TCR121 | EVDPIGHLY (SEQ | A0101 | 3068 | 3367 | 3673 | 3978 |
| | ID NO: 3051) | | | | | |
| TCR122 | EVDPIGHLY (SEQ | A0101 | 3069 | 3368 | 3674 | 3979 |
| | ID NO: 3051) | | | | | |
| TCR123 | EVDPIGHLY (SEQ | A0101 | 3052 | 3356 | 3659 | 3967 |
| | ID NO: 3051) | | | | | |
| TCR124 | EVDPIGHLY (SEQ | A0101 | 3070 | 3369 | 3675 | 3980 |
| | ID NO: 3051) | | | | | |
| TCR125 | EVDPIGHLY (SEQ | A0101 | 3052 | 3355 | 3659 | 3966 |
| | ID NO: 3051) | | | | | |
| TCR126 | EVDPIGHLY (SEQ | A0101 | 3071 | 3370 | 3676 | 3981 |
| | ID NO: 3051) | | | | | |
| TCR127 | EVDPIGHLY (SEQ | A0101 | 3052 | 3353 | 3659 | 3964 |
| | ID NO: 3051) | | | | | |
| TCR128 | EVDPIGHLY (SEQ | A0101 | 3072 | 3371 | 3677 | 3982 |
| | ID NO: 3051) | | | | | |
| TCR129 | EVDPIGHLY (SEQ | A0101 | 3073 | 3372 | 3678 | 3983 |
| | ID NO: 3051) | | | | | |
| TCR130 | EVDPIGHLY (SEQ | A0101 | 3057 | 3351 | 3662 | 3962 |
| | ID NO: 3051) | | | | | |
| TCR131 | EVDPIGHLY (SEQ | A0101 | 3074 | 3373 | 3679 | 3984 |
| | ID NO: 3051) | | | | | |
| TCR132 | EVDPIGHLY (SEQ | A0101 | 3075 | 3374 | 3680 | 3985 |
| | ID NO: 3051) | | | | | |
| TCR133 | EVDPIGHLY (SEQ | A0101 | 3076 | 3375 | 3681 | 3986 |
| | ID NO: 3051) | | | | | |
| TCR134 | EVDPIGHLY (SEQ | A0101 | 3077 | 3376 | 3682 | 3987 |
| | ID NO: 3051) | | | | | |
| TCR135 | EVDPIGHLY (SEQ | A0101 | 3078 | 3377 | 3683 | 3988 |
| | ID NO: 3051) | | | | | |
| TCR136 | EVDPIGHLY (SEQ | A0101 | 3079 | 3378 | 3684 | 3989 |
| | ID NO: 3051) | | | | | |
| TCR137 | EVDPIGHLY (SEQ | A0101 | 3080 | 3379 | 3685 | 3990 |
| | ID NO: 3051) | | | | | |
| TCR138 | EVDPIGHLY (SEQ | A0101 | 3081 | 3380 | 3686 | 3991 |
| | ID NO: 3051) | | | | | |
| TCR139 | EVDPIGHLY (SEQ | A0101 | 3082 | 3381 | 3687 | 3992 |
| | ID NO: 3051) | | | | | |
| TCR140 | EVDPIGHLY (SEQ | A0101 | 3083 | 3382 | 3688 | 3993 |
| | ID NO: 3051) | | | | | |
| TCR141 | EVDPIGHLY (SEQ | A0101 | 3084 | 3383 | 3689 | 3994 |
| | ID NO: 3051) | | | | | |
| TCR142 | EVDPIGHLY (SEQ | A0101 | 3085 | 3384 | 3690 | 3995 |
| | ID NO: 3051) | | | | | |
| TCR143 | EVDPIGHLY (SEQ | A0101 | 3086 | 3385 | 3691 | 3996 |
| | ID NO: 3051) | | | | | |
| TCR144 | EVDPIGHLY (SEQ | A0101 | 3087 | 3386 | 3692 | 3997 |
| | ID NO: 3051) | | | | | |
| TCR145 | EVDPIGHLY (SEQ | A0101 | 3088 | 3387 | 3693 | 3998 |
| | ID NO: 3051) | | | | | |
| TCR146 | EVDPIGHLY (SEQ | A0101 | 3089 | 3388 | 3694 | 3999 |
| | ID NO: 3051) | | | | | |
| TCR147 | EVDPIGHLY (SEQ | A0101 | 3052 | 3389 | 3695 | 4000 |
| | ID NO: 3051) | | | | | |
| TCR148 | EVDPIGHLY (SEQ | A0101 | 3056 | 3351 | 3661 | 3962 |
| | ID NO: 3051) | | | | | |
| TCR149 | EVDPIGHLY (SEQ | A0101 | 3090 | 3390 | 3696 | 4001 |
| | ID NO: 3051) | | | | | |
| TCR150 | EVDPIGHLY (SEQ | A0101 | 3091 | 3391 | 3697 | 4002 |
| | ID NO: 3051) | | | | | |
| TCR151 | EVDPIGHLY (SEQ | A0101 | 3092 | 3392 | 3698 | 4003 |
| | ID NO: 3051) | | | | | |
| TCR152 | EVDPIGHLY (SEQ | A0101 | 3093 | 3393 | 3699 | 4004 |
| | ID NO: 3051) | | | | | |
| TCR153 | EVDPIGHLY (SEQ | A0101 | 3053 | 3356 | 3700 | 3967 |
| | ID NO: 3051) | | | | | |
| TCR154 | EVDPIGHLY (SEQ | A0101 | 3094 | 3394 | 3701 | 4005 |
| | ID NO: 3051) | | | | | |
| TCR155 | EVDPIGHLY (SEQ | A0101 | 3054 | 3363 | 3658 | 3974 |
| | ID NO: 3051) | | | | | |
| TCR156 | EVDPIGHLY (SEQ | A0101 | 3095 | 3395 | 3702 | 4006 |
| | ID NO: 3051) | | | | | |
| TCR157 | EVDPIGHLY (SEQ | A0101 | 3054 | 3351 | 3658 | 3962 |
| | ID NO: 3051) | | | | | |
| TCR158 | EVDPIGHLY (SEQ | A0101 | 3096 | 3396 | 3703 | 4007 |
| | ID NO: 3051) | | | | | |
| TCR159 | EVDPIGHLY (SEQ | A0101 | 3053 | 3355 | 3657 | 3966 |
| | ID NO: 3051) | | | | | |
| TCR160 | EVDPIGHLY (SEQ | A0101 | 3097 | 3397 | 3704 | 4008 |
| | ID NO: 3051) | | | | | |
| TCR161 | EVDPIGHLY (SEQ | A0101 | 3098 | 3398 | 3705 | 4009 |
| | ID NO: 3051) | | | | | |
| TCR162 | EVDPIGHLY (SEQ | A0101 | 3099 | 3352 | 3706 | 3963 |
| | ID NO: 3051) | | | | | |
| TCR163 | EVDPIGHLY (SEQ | A0101 | 3100 | 3399 | 3707 | 4010 |
| | ID NO: 3051) | | | | | |
| TCR164 | EVDPIGHLY (SEQ | A0101 | 3053 | 3353 | 3657 | 3964 |
| | ID NO: 3051) | | | | | |
| TCR165 | EVDPIGHLY (SEQ | A0101 | 3101 | 3400 | 3708 | 4011 |
| | ID NO: 3051) | | | | | |
| TCR166 | EVDPIGHLY (SEQ | A0101 | 3102 | 3401 | 3709 | 4012 |
| | ID NO: 3051) | | | | | |
| TCR167 | EVDPIGHLY (SEQ | A0101 | 3058 | 3352 | 3663 | 3963 |
| | ID NO: 3051) | | | | | |
| TCR168 | EVDPIGHLY (SEQ | A0101 | 3103 | 3402 | 3710 | 4013 |
| | ID NO: 3051) | | | | | |
| TCR169 | EVDPIGHLY (SEQ | A0101 | 3104 | 3403 | 3711 | 4014 |
| | ID NO: 3051) | | | | | |
| TCR170 | EVDPIGHLY (SEQ | A0101 | 3105 | 3404 | 3712 | 4015 |
| | ID NO: 3051) | | | | | |
| TCR171 | EVDPIGHLY (SEQ | A0101 | 3106 | 3405 | 3713 | 4016 |
| | ID NO: 3051) | | | | | |
| TCR172 | EVDPIGHLY (SEQ | A0101 | 3107 | 3406 | 3714 | 4017 |
| | ID NO: 3051) | | | | | |
| TCR173 | EVDPIGHLY (SEQ | A0101 | 3108 | 3407 | 3715 | 4018 |
| | ID NO: 3051) | | | | | |
| TCR174 | EVDPIGHLY (SEQ | A0101 | 3109 | 3408 | 3716 | 4019 |
| | ID NO: 3051) | | | | | |
| TCR175 | EVDPIGHLY (SEQ | A0101 | 3110 | 3409 | 3717 | 4020 |
| | ID NO: 3051) | | | | | |
| TCR176 | EVDPIGHLY (SEQ | A0101 | 3111 | 3410 | 3718 | 4021 |
| TCR177 | EVDPIGHLY (SEQ | A0101 | 3112 | 3411 | 3719 | 4022 |
| | ID NO: 3051) | | | | | |
| TCR178 | EVDPIGHLY (SEQ | A0101 | 3113 | 3412 | 3720 | 4023 |
| | ID NO: 3051) | | | | | |
| TCR179 | EVDPIGHLY (SEQ | A0101 | 3058 | 3351 | 3663 | 3962 |
| | ID NO: 3051) | | | | | |
| TCR180 | EVDPIGHLY (SEQ | A0101 | 3052 | 3354 | 3659 | 3965 |
| | ID NO: 3051) | | | | | |
| TCR181 | EVDPIGHLY (SEQ | A0101 | 3072 | 3353 | 3677 | 4024 |
| | ID NO: 3051) | | | | | |
| TCR182 | EVDPIGHLY (SEQ | A0101 | 3052 | 3413 | 3721 | 4025 |
| | ID NO: 3051) | | | | | |
| TCR183 | EVDPIGHLY (SEQ | A0101 | 3114 | 3414 | 3722 | 4026 |
| | ID NO: 3051) | | | | | |
| TCR184 | EVDPIGHLY (SEQ | A0101 | 3058 | 3355 | 3663 | 3966 |
| | ID NO: 3051) | | | | | |
| TCR185 | EVDPIGHLY (SEQ | A0101 | 3052 | 3415 | 3659 | 4027 |
| | ID NO: 3051) | | | | | |
| TCR186 | EVDPIGHLY (SEQ | A0101 | 3114 | 3353 | 3722 | 3964 |
| | ID NO: 3051) | | | | | |
| TCR187 | EVDPIGHLY (SEQ | A0101 | 3115 | 3416 | 3723 | 4028 |
| | ID NO: 3051) | | | | | |
| TCR188 | EVDPIGHLY (SEQ | A0101 | 3116 | 3417 | 3724 | 4029 |
| | ID NO: 3051) | | | | | |
| TCR189 | EVDPIGHLY (SEQ | A0101 | 3117 | 3418 | 3725 | 4030 |
| | ID NO: 3051) | | | | | |
| TCR190 | EVDPIGHLY (SEQ | A0101 | 3118 | 3419 | 3726 | 4031 |
| | ID NO: 3051) | | | | | |
| TCR191 | EVDPIGHLY (SEQ | A0101 | 3119 | 3420 | 3727 | 4032 |
| | ID NO: 3051) | | | | | |
| TCR192 | EVDPIGHLY (SEQ | A0101 | 3120 | 3352 | 3728 | 4033 |
| | ID NO: 3051) | | | | | |
| TCR193 | EVDPIGHLY (SEQ | A0101 | 3121 | 3421 | 3729 | 4034 |
| | ID NO: 3051) | | | | | |
| TCR194 | EVDPIGHLY (SEQ | A0101 | 3054 | 3367 | 3658 | 3978 |
| | ID NO: 3051) | | | | | |
| TCR195 | EVDPIGHLY (SEQ | A0101 | 3122 | 3422 | 3730 | 4035 |
| | ID NO: 3051) | | | | | |
| TCR196 | EVDPIGHLY (SEQ | A0101 | 3123 | 3423 | 3731 | 4036 |
| | ID NO: 3051) | | | | | |
| TCR197 | EVDPIGHLY (SEQ | A0101 | 3124 | 3424 | 3732 | 4037 |
| | ID NO: 3051) | | | | | |
| TCR198 | EVDPIGHLY (SEQ | A0101 | 3112 | 3351 | 3719 | 3962 |
| | ID NO: 3051) | | | | | |
| TCR199 | EVDPIGHLY (SEQ | A0101 | 3060 | 3352 | 3665 | 3963 |
| | ID NO: 3051) | | | | | |
| TCR200 | EVDPIGHLY (SEQ | A0101 | 3059 | 3351 | 3664 | 3962 |
| | ID NO: 3051) | | | | | |
| TCR201 | EVDPIGHLY (SEQ | A0101 | 3071 | 3355 | 3676 | 3966 |
| | ID NO: 3051) | | | | | |
| TCR202 | EVDPIGHLY (SEQ | A0101 | 3125 | 3425 | 3733 | 4038 |
| | ID NO: 3051) | | | | | |
| TCR203 | EVDPIGHLY (SEQ | A0101 | 3126 | 3426 | *3734 | 4039 |
| | ID NO: 3051) | | | | | |
| TCR204 | EVDPIGHLY (SEQ | A0101 | 3127 | 3427 | 3735 | 4040 |
| | ID NO: 3051) | | | | | |
| TCR205 | EVDPIGHLY (SEQ | A0101 | 3128 | 3428 | 3736 | 4041 |
| | ID NO: 3051) | | | | | |
| TCR206 | EVDPIGHLY (SEQ | A0101 | 3129 | 3429 | 3737 | 4042 |
| | ID NO: 3051) | | | | | |
| TCR207 | EVDPIGHLY (SEQ | A0101 | 3130 | 3352 | 3738 | 3963 |
| | ID NO: 3051) | | | | | |
| TCR208 | EVDPIGHLY (SEQ | A0101 | 3052 | 3362 | 3659 | 3973 |
| | ID NO: 3051) | | | | | |
| TCR209 | EVDPIGHLY (SEQ | A0101 | 3055 | 3352 | 3660 | 3963 |
| | ID NO: 3051) | | | | | |
| TCR210 | EVDPIGHLY (SEQ | A0101 | 3131 | 3430 | 3739 | 4043 |
| | ID NO: 3051) | | | | | |
| TCR211 | EVDPIGHLY (SEQ | A0101 | 3132 | 3431 | 3740 | 4044 |
| | ID NO: 3051) | | | | | |
| TCR212 | EVDPIGHLY (SEQ | A0101 | 3133 | 3432 | 3741 | 4045 |
| | ID NO: 3051) | | | | | |
| TCR213 | EVDPIGHLY (SEQ | A0101 | 3053 | 3381 | 3657 | 3992 |
| | ID NO: 3051) | | | | | |
| TCR214 | EVDPIGHLY (SEQ | A0101 | 3134 | 3433 | 3742 | 4046 |
| | ID NO: 3051) | | | | | |
| TCR215 | EVDPIGHLY (SEQ | A0101 | 3061 | 3351 | 3666 | 3962 |
| | ID NO: 3051) | | | | | |
| TCR216 | EVDPIGHLY (SEQ | A0101 | 3104 | 3352 | 3711 | 3963 |
| | ID NO: 3051) | | | | | |
| TCR217 | EVDPIGHLY (SEQ | A0101 | 3055 | 3351 | 3660 | 3962 |
| | ID NO: 3051) | | | | | |
| TCR218 | EVDPIGHLY (SEQ | A0101 | 3058 | 3353 | 3663 | 3964 |
| | ID NO: 3051) | | | | | |
| TCR219 | EVDPIGHLY (SEQ | A0101 | 3135 | 3434 | 3743 | 4047 |
| | ID NO: 3051) | | | | | |
| TCR220 | EVDPIGHLY (SEQ | A0101 | 3052 | 3435 | 3744 | 4048 |
| | ID NO: 3051) | | | | | |
| TCR221 | EVDPIGHLY (SEQ | A0101 | 3136 | 3436 | 3745 | 4049 |
| | ID NO: 3051) | | | | | |
| TCR222 | EVDPIGHLY (SEQ | A0101 | 3137 | 3437 | 3746 | 4050 |
| | ID NO: 3051) | | | | | |
| TCR223 | EVDPIGHLY (SEQ | A0101 | 3138 | 3438 | 3747 | 4051 |
| | ID NO: 3051) | | | | | |
| TCR224 | EVDPIGHLY (SEQ | A0101 | 3139 | 3439 | 3748 | 4052 |
| | ID NO: 3051) | | | | | |
| TCR225 | EVDPIGHLY (SEQ | A0101 | 3140 | 3440 | 3749 | 4053 |
| | ID NO: 3051) | | | | | |
| TCR226 | EVDPIGHLY (SEQ | A0101 | 3141 | 3441 | 3750 | 4054 |
| | ID NO: 3051) | | | | | |
| TCR227 | EVDPIGHLY (SEQ | A0101 | 3142 | 3442 | 3751 | 4055 |
| | ID NO: 3051) | | | | | |
| TCR228 | EVDPIGHLY (SEQ | A0101 | 3143 | 3443 | 3752 | 4056 |
| | ID NO: 3051) | | | | | |
| TCR229 | EVDPIGHLY (SEQ | A0101 | 3144 | 3444 | 3753 | 4057 |
| | ID NO: 3051) | | | | | |
| TCR230 | EVDPIGHLY (SEQ | A0101 | 3145 | 3445 | 3754 | 4058 |
| | ID NO: 3051) | | | | | |
| TCR231 | EVDPIGHLY (SEQ | A0101 | 3136 | 3444 | 3755 | 4057 |
| | ID NO: 3051) | | | | | |
| TCR232 | EVDPIGHLY (SEQ | A0101 | 3146 | 3446 | 3756 | 4059 |
| | ID NO: 3051) | | | | | |
| TCR233 | EVDPIGHLY (SEQ | A0101 | 3147 | 3447 | 3757 | 4060 |
| | ID NO: 3051) | | | | | |
| TCR234 | EVDPIGHLY (SEQ | A0101 | 3148 | 3448 | 3758 | 4061 |
| | ID NO: 3051) | | | | | |
| TCR235 | EVDPIGHLY (SEQ | A0101 | 3149 | 3449 | 3759 | 4062 |
| | ID NO: 3051) | | | | | |
| TCR236 | EVDPIGHLY (SEQ | A0101 | 3150 | 3450 | 3760 | 4063 |
| | ID NO: 3051) | | | | | |
| TCR237 | EVDPIGHLY (SEQ | A0101 | 3151 | 3436 | 3761 | 4049 |
| | ID NO: 3051) | | | | | |
| TCR238 | EVDPIGHLY (SEQ | A0101 | 3139 | 3436 | 3748 | 4049 |
| | ID NO: 3051) | | | | | |
| TCR239 | EVDPIGHLY (SEQ | A0101 | 3152 | 3451 | 3762 | 4064 |
| | ID NO: 3051) | | | | | |
| TCR240 | EVDPIGHLY (SEQ | A0101 | 3153 | 3452 | 3763 | 4065 |
| | ID NO: 3051) | | | | | |
| TCR241 | EVDPIGHLY (SEQ | A0101 | 3154 | 3453 | 3764 | 4066 |
| | ID NO: 3051) | | | | | |
| TCR242 | EVDPIGHLY (SEQ | A0101 | 3155 | 3454 | 3765 | 4067 |
| | ID NO: 3051) | | | | | |
| TCR243 | EVDPIGHLY (SEQ | A0101 | 3137 | 3440 | 3746 | 4053 |
| TCR244 | EVDPIGHLY (SEQ | A0101 | 3156 | 3455 | 3766 | 4068 |
| | ID NO: 3051) | | | | | |
| TCR245 | EVDPIGHLY (SEQ | A0101 | 3151 | 3456 | 3761 | 4069 |
| | ID NO: 3051) | | | | | |
| TCR246 | EVDPIGHLY (SEQ | A0101 | 3157 | 3457 | 3767 | 4070 |
| | ID NO: 3051) | | | | | |
| TCR247 | EVDPIGHLY (SEQ | A0101 | 3158 | 3458 | 3768 | 4071 |
| | ID NO: 3051) | | | | | |
| TCR248 | EVDPIGHLY (SEQ | A0101 | 3159 | 3459 | 3769 | 4072 |
| | ID NO: 3051) | | | | | |
| TCR249 | EVDPIGHLY (SEQ | A0101 | 3160 | 3460 | 3770 | 4073 |
| | ID NO: 3051) | | | | | |
| TCR250 | EVDPIGHLY (SEQ | A0101 | 3077 | 3461 | 3771 | 4074 |
| | ID NO: 3051) | | | | | |
| TCR251 | EVDPIGHLY (SEQ | A0101 | 3161 | 3462 | 3772 | 4075 |
| | ID NO: 3051) | | | | | |
| TCR252 | EVDPIGHLY (SEQ | A0101 | 3162 | 3463 | 3773 | 4076 |
| | ID NO: 3051) | | | | | |
| TCR253 | EVDPIGHLY (SEQ | A0101 | 3163 | 3464 | 3774 | 4077 |
| | ID NO: 3051) | | | | | |
| TCR254 | EVDPIGHLY (SEQ | A0101 | 3164 | 3465 | 3775 | 4078 |
| | ID NO: 3051) | | | | | |
| TCR255 | EVDPIGHLY (SEQ | A0101 | 3137 | 3442 | 3746 | 4055 |
| | ID NO: 3051) | | | | | |
| TCR256 | EVDPIGHLY (SEQ | A0101 | 3136 | 3438 | 3745 | 4051 |
| | ID NO: 3051) | | | | | |
| TCR257 | EVDPIGHLY (SEQ | A0101 | 3165 | 3466 | 3776 | 4079 |
| | ID NO: 3051) | | | | | |
| TCR258 | EVDPIGHLY (SEQ | A0101 | 3166 | 3467 | 3777 | 4080 |
| | ID NO: 3051) | | | | | |
| TCR259 | EVDPIGHLY (SEQ | A0101 | 3167 | 3468 | 3778 | 4081 |
| | ID NO: 3051) | | | | | |
| TCR260 | EVDPIGHLY (SEQ | A0101 | 3168 | 3469 | 3779 | 4082 |
| | ID NO: 3051) | | | | | |
| TCR261 | EVDPIGHLY (SEQ | A0101 | 3169 | 3470 | 3780 | 4083 |
| | ID NO: 3051) | | | | | |
| TCR262 | EVDPIGHLY (SEQ | A0101 | 3137 | 3436 | 3746 | 4049 |
| | ID NO: 3051) | | | | | |
| TCR263 | EVDPIGHLY (SEQ | A0101 | 3170 | 3471 | 3781 | 4084 |
| | ID NO: 3051) | | | | | |
| TCR264 | EVDPIGHLY (SEQ | A0101 | 3171 | 3472 | 3782 | 4085 |
| | ID NO: 3051) | | | | | |
| TCR265 | EVDPIGHLY (SEQ | A0101 | 3172 | 3473 | 3783 | 4086 |
| | ID NO: 3051) | | | | | |
| TCR266 | EVDPIGHLY (SEQ | A0101 | 3173 | 3474 | 3784 | 4087 |
| | ID NO: 3051) | | | | | |
| TCR267 | EVDPIGHLY (SEQ | A0101 | 3174 | 3475 | 3785 | 4088 |
| | ID NO: 3051) | | | | | |
| TCR268 | EVDPIGHLY (SEQ | A0101 | 3175 | 3476 | 3786 | 4089 |
| | ID NO: 3051) | | | | | |
| TCR269 | EVDPIGHLY (SEQ | A0101 | 3176 | 3477 | 3787 | 4090 |
| | ID NO: 3051) | | | | | |
| TCR270 | EVDPIGHLY (SEQ | A0101 | 3177 | 3478 | 3788 | 4091 |
| | ID NO: 3051) | | | | | |
| TCR271 | EVDPIGHLY (SEQ | A0101 | 3178 | 3479 | 3789 | 4092 |
| | ID NO: 3051) | | | | | |
| TCR272 | EVDPIGHLY (SEQ | A0101 | 3179 | 3480 | 3790 | 4093 |
| | ID NO: 3051) | | | | | |
| TCR273 | EVDPIGHLY (SEQ | A0101 | 3180 | 3481 | 3791 | 4094 |
| | ID NO: 3051) | | | | | |
| TCR274 | EVDPIGHLY (SEQ | A0101 | 3136 | 3482 | 3755 | 4095 |
| | ID NO: 3051) | | | | | |
| TCR275 | EVDPIGHLY (SEQ | A0101 | 3181 | 3483 | 3792 | 4096 |
| | ID NO: 3051) | | | | | |
| TCR276 | EVDPIGHLY (SEQ | A0101 | 3182 | 3484 | 3793 | 4097 |
| | ID NO: 3051) | | | | | |
| TCR277 | EVDPIGHLY (SEQ | A0101 | 3183 | 3485 | 3794 | 4098 |
| | ID NO: 3051) | | | | | |
| TCR278 | EVDPIGHLY (SEQ | A0101 | 3184 | 3486 | 3795 | 4099 |
| | ID NO: 3051) | | | | | |
| TCR279 | EVDPIGHLY (SEQ | A0101 | 3185 | 3487 | 3796 | 4100 |
| | ID NO: 3051) | | | | | |
| TCR280 | EVDPIGHLY (SEQ | A0101 | 3186 | 3488 | 3797 | 4101 |
| | ID NO: 3051) | | | | | |
| TCR281 | EVDPIGHLY (SEQ | A0101 | 3187 | 3489 | 3798 | 4102 |
| | ID NO: 3051) | | | | | |
| TCR282 | EVDPIGHLY (SEQ | A0101 | 3188 | 3482 | 3799 | 4095 |
| | ID NO: 3051) | | | | | |
| TCR283 | EVDPIGHLY (SEQ | A0101 | 3189 | 3490 | 3800 | 4103 |
| | ID NO: 3051) | | | | | |
| TCR284 | EVDPIGHLY (SEQ | A0101 | 3190 | 3491 | 3801 | 4104 |
| | ID NO: 3051) | | | | | |
| TCR285 | EVDPIGHLY (SEQ | A0101 | 3191 | 3492 | 3802 | 4105 |
| | ID NO: 3051) | | | | | |
| TCR286 | EVDPIGHLY (SEQ | A0101 | 3192 | 3493 | 3803 | 4106 |
| | ID NO: 3051) | | | | | |
| TCR287 | EVDPIGHLY (SEQ | A0101 | 3193 | 3494 | 3804 | 4107 |
| | ID NO: 3051) | | | | | |
| TCR288 | EVDPIGHLY (SEQ | A0101 | 3194 | 3495 | 3805 | 4108 |
| | ID NO: 3051) | | | | | |
| TCR289 | EVDPIGHLY (SEQ | A0101 | 3195 | 3496 | 3806 | 4109 |
| | ID NO: 3051) | | | | | |
| TCR290 | EVDPIGHLY (SEQ | A0101 | 3196 | 3497 | 3807 | 4110 |
| | ID NO: 3051) | | | | | |
| TCR291 | EVDPIGHLY (SEQ | A0101 | 3197 | 3498 | 3808 | 4111 |
| | ID NO: 3051) | | | | | |
| TCR292 | EVDPIGHLY (SEQ | A0101 | 3198 | 3499 | 3809 | 4112 |
| | ID NO: 3051) | | | | | |
| TCR293 | EVDPIGHLY (SEQ | A0101 | 3199 | 3500 | 3810 | 4113 |
| | ID NO: 3051) | | | | | |
| TCR294 | EVDPIGHLY (SEQ | A0101 | 3137 | 3449 | 3746 | 4062 |
| | ID NO: 3051) | | | | | |
| TCR295 | EVDPIGHLY (SEQ | A0101 | 3200 | 3436 | 3811 | 4049 |
| | ID NO: 3051) | | | | | |
| TCR296 | EVDPIGHLY (SEQ | A0101 | 3201 | 3501 | 3812 | 4114 |
| | ID NO: 3051) | | | | | |
| TCR297 | EVDPIGHLY (SEQ | A0101 | 3138 | 3436 | 3747 | 4049 |
| | ID NO: 3051) | | | | | |
| TCR298 | EVDPIGHLY (SEQ | A0101 | 3202 | 3502 | 3813 | 4115 |
| | ID NO: 3051) | | | | | |
| TCR299 | EVDPIGHLY (SEQ | A0101 | 3203 | 3503 | 3814 | 4116 |
| | ID NO: 3051) | | | | | |
| TCR300 | EVDPIGHLY (SEQ | A0101 | 3204 | 3504 | 3815 | 4117 |
| | ID NO: 3051) | | | | | |
| TCR301 | EVDPIGHLY (SEQ | A0101 | 3205 | 3505 | 3816 | 4118 |
| | ID NO: 3051) | | | | | |
| TCR302 | EVDPIGHLY (SEQ | A0101 | 3206 | 3506 | 3817 | 4119 |
| | ID NO: 3051) | | | | | |
| TCR303 | EVDPIGHLY (SEQ | A0101 | 3207 | 3507 | 3818 | 4120 |
| | ID NO: 3051) | | | | | |
| TCR304 | EVDPIGHLY (SEQ | A0101 | 3148 | 3440 | 3758 | 4053 |
| | ID NO: 3051) | | | | | |
| TCR305 | EVDPIGHLY (SEQ | A0101 | 3208 | 3508 | 3819 | 4121 |
| | ID NO: 3051) | | | | | |
| TCR306 | EVDPIGHLY (SEQ | A0101 | 3209 | 3509 | 3820 | 4122 |
| | ID NO: 3051) | | | | | |
| TCR307 | EVDPIGHLY (SEQ | A0101 | 3210 | 3510 | 3821 | 4123 |
| | ID NO: 3051) | | | | | |
| TCR308 | EVDPIGHLY (SEQ | A0101 | 3211 | 3511 | 3822 | 4124 |
| | ID NO: 3051) | | | | | |
| TCR309 | EVDPIGHLY (SEQ | A0101 | 3212 | 3512 | 3823 | 4125 |
| | ID NO: 3051) | | | | | |
| TCR310 | EVDPIGHLY (SEQ | A0101 | 3213 | 3513 | 3824 | 4126 |
| TCR311 | EVDPIGHLY (SEQ | A0101 | 3214 | 3514 | 3825 | 4127 |
| | ID NO: 3051) | | | | | |
| TCR312 | EVDPIGHLY (SEQ | A0101 | 3215 | 3515 | 3826 | 4128 |
| | ID NO: 3051) | | | | | |
| TCR313 | EVDPIGHLY (SEQ | A0101 | 3216 | 3516 | 3827 | 4129 |
| | ID NO: 3051) | | | | | |
| TCR314 | EVDPIGHLY (SEQ | A0101 | 3217 | 3517 | 3828 | 4130 |
| | ID NO: 3051) | | | | | |
| TCR315 | EVDPIGHLY (SEQ | A0101 | 3218 | 3518 | 3829 | 4131 |
| | ID NO: 3051) | | | | | |
| TCR316 | EVDPIGHLY (SEQ | A0101 | 3219 | 3519 | 3830 | 4132 |
| | ID NO: 3051) | | | | | |
| TCR3I7 | EVDPIGHLY (SEQ | A0101 | 3220 | 3520 | 3831 | 4133 |
| | ID NO: 3051) | | | | | |
| TCR318 | EVDPIGHLY (SEQ | A0101 | 3221 | 3521 | 3832 | 4134 |
| | ID NO: 3051) | | | | | |
| TCR319 | EVDPIGHLY (SEQ | A0101 | 3217 | 3518 | 3828 | 4131 |
| | ID NO: 3051) | | | | | |
| TCR320 | EVDPIGHLY (SEQ | A0101 | 3222 | 3522 | 3833 | 4135 |
| | ID NO: 3051) | | | | | |
| TCR321 | EVDPIGHLY (SEQ | A0101 | 3223 | 3523 | 3834 | 4136 |
| | ID NO: 3051) | | | | | |
| TCR322 | EVDPIGHLY (SEQ | A0101 | 3224 | 3524 | 3835 | 4137 |
| | ID NO: 3051) | | | | | |
| TCR323 | EVDPIGHLY (SEQ | A0101 | 3225 | 3525 | 3836 | 4138 |
| | ID NO: 3051) | | | | | |
| TCR324 | EVDPIGHLY (SEQ | A0101 | 3226 | 3526 | 3837 | 4139 |
| | ID NO: 3051) | | | | | |
| TCR325 | EVDPIGHLY (SEQ | A0101 | 3227 | 3527 | 3838 | 4140 |
| | ID NO: 3051) | | | | | |
| TCR326 | EVDPIGHLY (SEQ | A0101 | 3228 | 3528 | 3839 | 4141 |
| | ID NO: 3051) | | | | | |
| TCR327 | EVDPIGHLY (SEQ | A0101 | 3229 | 3529 | 3840 | 4142 |
| | ID NO: 3051) | | | | | |
| TCR328 | EVDPIGHLY (SEQ | A0101 | 3230 | 3530 | 3841 | 4143 |
| | ID NO: 3051) | | | | | |
| TCR329 | EVDPIGHLY (SEQ | A0101 | 3217 | 3525 | 3828 | 4138 |
| | ID NO: 3051) | | | | | |
| TCR330 | EVDPIGHLY (SEQ | A0101 | 3231 | 3531 | 3842 | 4144 |
| | ID NO: 3051) | | | | | |
| TCR331 | EVDPIGHLY (SEQ | A0101 | 3232 | 3532 | 3843 | 4145 |
| | ID NO: 3051) | | | | | |
| TCR332 | EVDPIGHLY (SEQ | A0101 | 3233 | 3520 | 3844 | 4133 |
| | ID NO: 3051) | | | | | |
| TCR333 | EVDPIGHLY (SEQ | A0101 | 3217 | 3530 | 3828 | 4143 |
| | ID NO: 3051) | | | | | |
| TCR334 | EVDPIGHLY (SEQ | A0101 | 3234 | 3533 | 3845 | 4146 |
| | ID NO: 3051) | | | | | |
| TCR335 | EVDPIGHLY (SEQ | A0101 | 3235 | 3534 | 3846 | 4147 |
| | ID NO: 3051) | | | | | |
| TCR336 | EVDPIGHLY (SEQ | A0101 | 3217 | 3532 | 3828 | 4145 |
| | ID NO: 3051) | | | | | |
| TCR337 | EVDPIGHLY (SEQ | A0101 | 3236 | 3535 | 3847 | 4148 |
| | ID NO: 3051) | | | | | |
| TCR338 | EVDPIGHLY (SEQ | A0101 | 3237 | 3536 | 3848 | 4149 |
| | ID NO: 3051) | | | | | |
| TCR339 | EVDPIGHLY (SEQ | A0101 | 3238 | 3537 | 3849 | 4150 |
| | ID NO: 3051) | | | | | |
| TCR340 | EVDPIGHLY (SEQ | A0101 | 3239 | 3538 | 3850 | 4151 |
| | ID NO: 3051) | | | | | |
| TCR341 | EVDPIGHLY (SEQ | A0101 | 3240 | 3539 | 3851 | 4152 |
| | ID NO: 3051) | | | | | |
| TCR342 | EVDPIGHLY (SEQ | A0101 | 3241 | 3540 | 3852 | 4153 |
| | ID NO: 3051) | | | | | |
| TCR343 | EVDPIGHLY (SEQ | A0101 | 3242 | 3541 | 3853 | 4154 |
| | ID NO: 3051) | | | | | |
| TCR344 | EVDPIGHLY (SEQ | A0101 | 3243 | 3542 | 3854 | 4155 |
| | ID NO: 3051) | | | | | |
| TCR345 | EVDPIGHLY (SEQ | A0101 | 3244 | 3543 | 3855 | 4156 |
| | ID NO: 3051) | | | | | |
| TCR346 | EVDPIGHLY (SEQ | A0101 | 3245 | 3544 | 3831 | 4157 |
| | ID NO: 3051) | | | | | |
| TCR347 | EVDPIGHLY (SEQ | A0101 | 3246 | 3545 | 3856 | 4158 |
| | ID NO: 3051) | | | | | |
| TCR348 | EVDPIGHLY (SEQ | A0101 | 3247 | 3546 | 3857 | 4159 |
| | ID NO: 3051) | | | | | |
| TCR349 | EVDPIGHLY (SEQ | A0101 | 3248 | 3547 | 3858 | 4160 |
| | ID NO: 3051) | | | | | |
| TCR350 | EVDPIGHLY (SEQ | A0101 | 3249 | 3548 | 3859 | 4161 |
| | ID NO: 3051) | | | | | |
| TCR351 | EVDPIGHLY (SEQ | A0101 | 3217 | 3524 | 3828 | 4137 |
| | ID NO: 3051) | | | | | |
| TCR352 | EVDPIGHLY (SEQ | A0101 | 3250 | 3549 | 3860 | 4162 |
| | ID NO: 3051) | | | | | |
| TCR353 | EVDPIGHLY (SEQ | A0101 | 3251 | 3550 | 3861 | 4163 |
| | ID NO: 3051) | | | | | |
| TCR354 | EVDPIGHLY (SEQ | A0101 | 3252 | 3551 | 3862 | 4164 |
| | ID NO: 3051) | | | | | |
| TCR355 | EVDPIGHLY (SEQ | A0101 | 3253 | 3552 | 3863 | 4165 |
| | ID NO: 3051) | | | | | |
| TCR356 | EVDPIGHLY (SEQ | A0101 | 3254 | 3553 | 3864 | 4166 |
| | ID NO: 3051) | | | | | |
| TCR357 | EVDPIGHLY (SEQ | A0101 | 3255 | 3554 | 3865 | 4167 |
| | ID NO: 3051) | | | | | |
| TCR358 | EVDPIGHLY (SEQ | A0101 | 3256 | 3555 | 3866 | 4168 |
| | ID NO: 3051) | | | | | |
| TCR359 | EVDPIGHLY (SEQ | A0101 | 3257 | 3556 | 3867 | 4169 |
| | ID NO: 3051) | | | | | |
| TCR360 | EVDPIGHLY (SEQ | A0101 | 3258 | 3557 | 3868 | 4170 |
| | ID NO: 3051) | | | | | |
| TCR361 | EVDPIGHLY (SEQ | A0101 | 3259 | 3558 | 3869 | 4171 |
| | ID NO: 3051) | | | | | |
| TCR362 | EVDPIGHLY (SEQ | A0101 | 3260 | 3559 | 3870 | 4172 |
| | ID NO: 3051) | | | | | |
| TCR363 | EVDPIGHLY (SEQ | A0101 | 3261 | 3560 | 3871 | 4173 |
| | ID NO: 3051) | | | | | |
| TCR364 | EVDPIGHLY (SEQ | A0101 | 3217 | 3519 | 3828 | 4132 |
| | ID NO: 3051) | | | | | |
| TCR365 | EVDPIGHLY (SEQ | A0101 | 3262 | 3561 | 3872 | 4174 |
| | ID NO: 3051) | | | | | |
| TCR366 | EVDPIGHLY (SEQ | A0101 | 3263 | 3562 | 3873 | 4175 |
| | ID NO: 3051) | | | | | |
| TCR367 | EVDPIGHLY (SEQ | A0101 | 3217 | 3563 | 3828 | 4176 |
| | ID NO: 3051) | | | | | |
| TCR368 | EVDPIGHLY (SEQ | A0101 | 3264 | 3564 | 3874 | 4177 |
| | ID NO: 3051) | | | | | |
| TCR369 | EVDPIGHLY (SEQ | A0101 | 3265 | 3565 | 3875 | 4178 |
| | ID NO: 3051) | | | | | |
| TCR370 | EVDPIGHLY (SEQ | A0101 | 3266 | 3566 | 3876 | 4179 |
| | ID NO: 3051) | | | | | |
| TCR371 | EVDPIGHLY (SEQ | A0101 | 3267 | 3567 | 3877 | 4180 |
| | ID NO: 3051) | | | | | |
| TCR372 | EVDPIGHLY (SEQ | A0101 | 3268 | 3568 | 3878 | 4181 |
| | ID NO: 3051) | | | | | |
| TCR373 | EVDPIGHLY (SEQ | A0101 | 3269 | 3569 | 3879 | 4182 |
| | ID NO: 3051) | | | | | |
| TCR374 | EVDPIGHLY (SEQ | A0101 | 3217 | 3528 | 3828 | 4141 |
| | ID NO: 3051) | | | | | |
| TCR375 | EVDPIGHLY (SEQ | A0101 | 3270 | 3570 | 3880 | 4183 |
| | ID NO: 3051) | | | | | |
| TCR376 | EVDPIGHLY (SEQ | A0101 | 3217 | 3571 | 3828 | 4184 |
| | ID NO: 3051) | | | | | |
| TCR377 | EVDPIGHLY (SEQ | A0101 | 3271 | 3572 | 3881 | 4185 |
| TCR378 | EVDPIGHLY (SEQ | A0101 | 3219 | 3522 | 3830 | 4135 |
| | ID NO: 3051) | | | | | |
| TCR379 | EVDPIGHLY (SEQ | A0101 | 3272 | 3573 | 3882 | 4186 |
| | ID NO: 3051) | | | | | |
| TCR380 | EVDPIGHLY (SEQ | A0101 | 3273 | 3574 | 3883 | 4187 |
| | ID NO: 3051) | | | | | |
| TCR381 | EVDPIGHLY (SEQ | A0101 | 3274 | 3575 | 3884 | 4188 |
| | ID NO: 3051) | | | | | |
| TCR382 | EVDPIGHLY (SEQ | A0101 | 3275 | 3576 | 3885 | 4189 |
| | ID NO: 3051) | | | | | |
| TCR383 | EVDPIGHLY (SEQ | A0101 | 3217 | 3577 | 3828 | 4190 |
| | ID NO: 3051) | | | | | |
| TCR384 | EVDPIGHLY (SEQ | A0101 | 3230 | 3517 | 3841 | 4130 |
| | ID NO: 3051) | | | | | |
| TCR385 | EVDPIGHLY (SEQ | A0101 | 3276 | 3578 | 3886 | 4191 |
| | ID NO: 3051) | | | | | |
| TCR386 | EVDPIGHLY (SEQ | A0101 | 3277 | 3579 | 3887 | 4192 |
| | ID NO: 3051) | | | | | |
| TCR387 | EVDPIGHLY (SEQ | A0101 | 3278 | 3580 | 3888 | 4193 |
| | ID NO: 3051) | | | | | |
| TCR388 | EVDPIGHLY (SEQ | A0101 | 3279 | 3581 | 3889 | 4194 |
| v | | | | | | |
| TCR389 | EVDPIGHLY (SEQ | A0101 | 3280 | 3582 | 3890 | 4195 |
| | ID NO: 3051) | | | | | |
| TCR390 | EVDPIGHLY (SEQ | A0101 | 3281 | 3583 | 3891 | 4196 |
| | ID NO: 3051) | | | | | |
| TCR391 | EVDPIGHLY (SEQ | A0101 | 3282 | 3584 | 3892 | 4197 |
| | ID NO: 3051) | | | | | |
| TCR392 | EVDPIGHLY (SEQ | A0101 | 3283 | 3585 | 3893 | 4198 |
| | ID NO: 3051) | | | | | |
| TCR393 | EVDPIGHLY (SEQ | A0101 | 3284 | 3586 | 3894 | 4199 |
| | ID NO: 3051) | | | | | |
| TCR394 | EVDPIGHLY (SEQ | A0101 | 3285 | 3587 | 3895 | 4200 |
| | ID NO: 3051) | | | | | |
| TCR395 | EVDPIGHLY (SEQ | A0101 | 3286 | 3588 | 3896 | 4201 |
| | ID NO: 3051) | | | | | |
| TCR396 | EVDPIGHLY (SEQ | A0101 | 3287 | 3589 | 3897 | 4202 |
| | ID NO: 3051) | | | | | |
| TCR397 | EVDPIGHLY (SEQ | A0101 | 3288 | 3590 | 3898 | 4203 |
| | ID NO: 3051) | | | | | |
| TCR398 | EVDPIGHLY (SEQ | A0101 | 3289 | 3591 | 3899 | 4204 |
| | ID NO: 3051) | | | | | |
| TCR399 | EVDPIGHLY (SEQ | A0101 | 3290 | 3592 | 3900 | 4205 |
| | ID NO: 3051) | | | | | |
| TCR400 | EVDPIGHLY (SEQ | A0101 | 3291 | 3593 | 3901 | 4206 |
| | ID NO: 3051) | | | | | |
| TCR401 | EVDPIGHLY (SEQ | A0101 | 3292 | 3594 | 3902 | 4207 |
| | ID NO: 3051) | | | | | |
| TCR402 | EVDPIGHLY (SEQ | A0101 | 3293 | 3595 | 3903 | 4208 |
| | ID NO: 3051) | | | | | |
| TCR403 | EVDPIGHLY (SEQ | A0101 | 3294 | 3596 | 3904 | 4209 |
| | ID NO: 3051) | | | | | |
| TCR404 | EVDPIGHLY (SEQ | A0101 | 3295 | 3597 | 3905 | 4210 |
| | ID NO: 3051) | | | | | |
| TCR405 | EVDPIGHLY (SEQ | A0101 | 3219 | 3598 | 3830 | 4211 |
| | ID NO: 3051) | | | | | |
| TCR406 | EVDPIGHLY (SEQ | A0101 | 3296 | 3599 | 3906 | 4212 |
| | ID NO: 3051) | | | | | |
| TCR407 | EVDPIGHLY (SEQ | A0101 | 3217 | 3600 | 3828 | 4213 |
| | ID NO: 3051) | | | | | |
| TCR408 | EVDPIGHLY (SEQ | A0101 | 3297 | 3601 | 3907 | 4214 |
| | ID NO: 3051) | | | | | |
| TCR409 | EVDPIGHLY (SEQ | A0101 | 3298 | 3602 | 3908 | 4215 |
| | ID NO: 3051) | | | | | |
| TCR410 | EVDPIGHLY (SEQ | A0101 | 3299 | 3603 | 3909 | 4216 |
| | ID NO: 3051) | | | | | |
| TCR411 | EVDPIGHLY (SEQ | A0101 | 3300 | 3604 | 3910 | 4217 |
| | ID NO: 3051) | | | | | |
| TCR412 | EVDPIGHLY (SEQ | A0101 | 3301 | 3605 | 3911 | 4218 |
| | ID NO: 3051) | | | | | |
| TCR413 | EVDPIGHLY (SEQ | A0101 | 3302 | 3606 | 3912 | 4219 |
| | ID NO: 3051) | | | | | |
| TCR414 | EVDPIGHLY (SEQ | A0101 | 3303 | 3607 | 3913 | 4220 |
| | ID NO: 3051) | | | | | |
| TCR415 | EVDPIGHLY (SEQ | A0101 | 3304 | 3608 | 3914 | 4221 |
| | ID NO: 3051) | | | | | |
| TCR416 | EVDPIGHLY (SEQ | A0101 | 3305 | 3609 | 3915 | 4222 |
| | ID NO: 3051) | | | | | |
| TCR417 | EVDPIGHLY (SEQ | A0101 | 3306 | 3610 | 3916 | 4223 |
| | ID NO: 3051) | | | | | |
| TCR418 | EVDPIGHLY (SEQ | A0101 | 3307 | 3611 | 3917 | 4224 |
| | ID NO: 3051) | | | | | |
| TCR419 | EVDPIGHLY (SEQ | A0101 | 3289 | 3595 | 3899 | 4208 |
| | ID NO: 3051) | | | | | |
| TCR420 | EVDPIGHLY (SEQ | A0101 | 3308 | 3612 | 3918 | 4225 |
| | ID NO: 3051) | | | | | |
| TCR421 | EVDPIGHLY (SEQ | A0101 | 3309 | 3613 | 3919 | 4226 |
| | ID NO: 3051) | | | | | |
| TCR422 | EVDPIGHLY (SEQ | A0101 | 3310 | 3614 | 3920 | 4227 |
| | ID NO: 3051) | | | | | |
| TCR423 | EVDPIGHLY (SEQ | A0101 | 3311 | 3615 | 3921 | 4228 |
| | ID NO: 3051) | | | | | |
| TCR424 | EVDPIGHLY (SEQ | A0101 | 3312 | 3616 | 3922 | 4229 |
| | ID NO: 3051) | | | | | |
| TCR425 | EVDPIGHLY (SEQ | A0101 | 3313 | 3617 | 3923 | 4230 |
| | ID NO: 3051) | | | | | |
| TCR426 | EVDPIGHLY (SEQ | A0101 | 3314 | 3618 | 3924 | 4231 |
| | ID NO: 3051) | | | | | |
| TCR427 | EVDPIGHLY (SEQ | A0101 | 3289 | 3619 | 3899 | 4232 |
| | ID NO: 3051) | | | | | |
| TCR428 | EVDPIGHLY (SEQ | A0101 | 3315 | 3620 | 3925 | 4233 |
| | ID NO: 3051) | | | | | |
| TCR429 | EVDPIGHLY (SEQ | A0101 | 3316 | 3621 | 3926 | 4234 |
| v | | | | | | |
| TCR430 | EVDPIGHLY (SEQ | A0101 | 3317 | 3622 | 3927 | 4235 |
| | ID NO: 3051) | | | | | |
| TCR431 | EVDPIGHLY (SEQ | A0101 | 3318 | 3623 | 3928 | 4236 |
| | ID NO: 3051) | | | | | |
| TCR432 | EVDPIGHLY (SEQ | A0101 | 3319 | 3624 | 3929 | 4237 |
| | ID NO: 3051) | | | | | |
| TCR433 | EVDPIGHLY (SEQ | A0101 | 3320 | 3625 | 3930 | 4238 |
| | ID NO: 3051) | | | | | |
| TCR434 | EVDPIGHLY (SEQ | A0101 | 3321 | 3626 | 3931 | 4239 |
| | ID NO: 3051) | | | | | |
| TCR435 | EVDPIGHLY (SEQ | A0101 | 3322 | 3627 | 3932 | 4240 |
| | ID NO: 3051) | | | | | |
| TCR436 | EVDPIGHLY (SEQ | A0101 | 3323 | 3628 | 3933 | 4241 |
| | ID NO: 3051) | | | | | |
| TCR437 | EVDPIGHLY (SEQ | A0101 | 3324 | 3629 | 3934 | 4242 |
| | ID NO: 3051) | | | | | |
| TCR438 | EVDPIGHLY (SEQ | A0101 | 3325 | 3602 | 3935 | 4215 |
| | ID NO: 3051) | | | | | |
| TCR439 | EVDPIGHLY (SEQ | A0101 | 3326 | 3630 | 3936 | 4243 |
| | ID NO: 3051) | | | | | |
| TCR440 | EVDPIGHLY (SEQ | A0101 | 3327 | 3631 | 3937 | 4244 |
| | ID NO: 3051) | | | | | |
| TCR441 | EVDPIGHLY (SEQ | A0101 | 3328 | 3632 | 3938 | 4245 |
| | ID NO: 3051) | | | | | |
| TCR442 | EVDPIGHLY (SEQ | A0101 | 3289 | 3598 | 3899 | 4211 |
| | ID NO: 3051) | | | | | |
| TCR443 | EVDPIGHLY (SEQ | A0101 | 3329 | 3633 | 3939 | 4246 |
| | ID NO: 3051) | | | | | |
| TCR444 | EVDPIGHLY (SEQ | A0101 | 3330 | 3634 | 3940 | 4247 |
| TCR445 | EVDPIGHLY (SEQ | A0101 | 3331 | 3635 | 3941 | 4248 |
| | ID NO: 3051) | | | | | |
| TCR446 | EVDPIGHLY (SEQ | A0101 | 3332 | 3636 | 3942 | 4249 |
| | ID NO: 3051) | | | | | |
| TCR447 | EVDPIGHLY (SEQ | A0101 | 3333 | 3637 | 3943 | 4250 |
| | ID NO: 3051) | | | | | |
| TCR448 | EVDPIGHLY (SEQ | A0101 | 3334 | 3638 | 3944 | 4251 |
| | ID NO: 3051) | | | | | |
| TCR449 | EVDPIGHLY (SEQ | A0101 | 3335 | 3639 | 3945 | 4252 |
| | ID NO: 3051) | | | | | |
| TCR450 | EVDPIGHLY (SEQ | A0101 | 3336 | 3640 | 3946 | 4253 |
| | ID NO: 3051) | | | | | |
| TCR45I | EVDPIGHLY (SEQ | A0101 | 3337 | 3641 | 3947 | 4254 |
| | ID NO: 3051) | | | | | |
| TCR452 | EVDPIGHLY (SEQ | A0101 | 3338 | 3642 | 3948 | 4255 |
| | ID NO: 3051) | | | | | |
| TCR453 | EVDPIGHLY (SEQ | A0101 | 3290 | 3596 | 3900 | 4209 |
| | ID NO: 3051) | | | | | |
| TCR454 | EVDPIGHLY (SEQ | A0101 | 3339 | 3643 | 3949 | 4256 |
| | ID NO: 3051) | | | | | |
| TCR455 | EVDPIGHLY (SEQ | A0101 | 3290 | 3601 | 3900 | 4214 |
| | ID NO: 3051) | | | | | |
| TCR456 | EVDPIGHLY (SEQ | A0101 | 3340 | 3644 | 3950 | 4257 |
| | ID NO: 3051) | | | | | |
| TCR457 | EVDPIGHLY (SEQ | A0101 | 3289 | 3611 | 3899 | 4224 |
| | ID NO: 3051) | | | | | |
| TCR458 | EVDPIGHLY (SEQ | A0101 | 3341 | 3645 | 3951 | 4258 |
| | ID NO: 3051) | | | | | |
| TCR459 | EVDPIGHLY (SEQ | A0101 | 3342 | 3646 | 3952 | 4259 |
| | ID NO: 3051) | | | | | |
| TCR460 | EVDPIGHLY (SEQ | A0101 | 3343 | 3647 | 3953 | 4260 |
| | ID NO: 3051) | | | | | |
| TCR461 | EVDPIGHLY (SEQ | A0101 | 3142 | 3648 | 3751 | 4261 |
| | ID NO: 3051) | | | | | |
| TCR462 | EVDPIGHLY (SEQ | A0101 | 3344 | 3649 | 3954 | 4262 |
| | ID NO: 3051) | | | | | |
| TCR463 | EVDPIGHLY (SEQ | A0101 | 3345 | 3650 | 3955 | 4263 |
| | ID NO: 3051) | | | | | |
| TCR464 | EVDPIGHLY (SEQ | A0101 | 3290 | 3614 | 3956 | 4264 |
| | ID NO: 3051) | | | | | |
| TCR465 | EVDPIGHLY (SEQ | A0101 | 3346 | 3651 | 3957 | 4265 |
| | ID NO: 3051) | | | | | |
| TCR466 | EVDPIGHLY (SEQ | A0101 | 3347 | 3652 | 3958 | 4266 |
| | ID NO: 3051) | | | | | |
| TCR467 | EVDPIGHLY (SEQ | A0101 | 3348 | 3653 | 3959 | 4267 |
| | ID NO: 3051) | | | | | |
| TCR468 | EVDPIGHLY (SEQ | A0101 | 3349 | 3654 | 3960 | 4268 |
| | ID NO: 3051) | | | | | |
| TCR469 | EVDPIGHLY (SEQ | A0101 | 3350 | 3655 | 3961 | 4269 |
| | ID NO: 3051) | | | | | |

TABLE 12
CDR3 and V(D)J sequences of TCR clonotypes confirmed through
cloning

| TCR | | | | | FULL LENGTH | FULL LENGTH |
|---|---|---|---|---|---|---|
| Clonotype ID | | | ALPHA CDR3 | BETA CDR3 | ALPHA VJ (SEQ ID | BETA V(D)J (SEQ |
| # | PEPTIDE | HLA | (SEQ ID NO) | (SEQ ID NO) | NO) | ID NO) |
| TCR2 | EVDPIGHLY (SEQ | A0101 | 4273 | 4287 | 4302 | 4317 |
| | ID NO: 3051) | | | | | |
| TCR4 | EVDPIGHLY (SEQ | A0101 | 4274 | 4288 | 4303 | 4318 |
| | ID NO: 3051) | | | | | |
| TCR53 | EVDPIGHLY (SEQ | A0101 | 4275 | 4289 | 4304 | 4319 |
| | ID NO: 3051) | | | | | |
| TCR54 | EVDPIGHLY (SEQ | A0101 | 4276 | 4290 | 4305 | 4320 |
| | ID NO: 3051) | | | | | |
| TCR19 | LLASSILCA (SEQ | A0201 | 4277 | 4291 | 4306 | 4321 |
| | ID NO: 4270) | | | | | |
| TCR21 | LLASSILCA (SEQ | A0201 | 4278 | 4292 | 4307 | 4322 |
| | ID NO: 4270) | | | | | |
| TCR22 | LLASSILCA (SEQ | A0201 | 4279 | 4293 | 4308 | 4323 |
| | ID NO: 4270) | | | | | |
| TCR18 | LLASSILCA (SEQ | A0201 | 4280 | 4294 | 4309 | 4324 |
| | ID NO: 4270) | | | | | |
| TCR23 | LLASSILCA (SEQ | A0201 | 4281 | 4295 | 4310 | 4325 |
| | ID NO: 4270) | | | | | |
| TCR26 | GVYDGEEHSV | A0201 | 4282 | 4296 | 4311 | 4326 |
| | (SEQ ID NO: 4271) | | | | | |
| TCR28 | GVYDGEEHSV | A0201 | 4283 | 4297 | 4312 | 4327 |
| | (SEQ ID NO: 4271) | | | | | |
| TCR29 | GEMSSNSTAL | B4402 | 4284 | 4298 | 4313 | 4328 |
| | (SEQ ID NO: 4272) | | | | | |
| TCR30 | GEMSSNSTAL | B4402 | 4285 | 4299 | 4314 | 4329 |
| | (SEQ ID NO: 4272) | | | | | |
| TCR32 | GEMSSNSTAL | B4402 | 4286 | 4300 | 4315 | 4330 |
| | (SEQ ID NO: 4272) | | | | | |
| TCR33 | GEMSSNSTAL | B4402 | 3138 | 4301 | 4316 | 4331 |
| | (SEQ ID NO: 4272) | | | | | |

TABLE A
TABLE A

| Target | HLA allele/peptide complex | SEQ ID NO | Protein Name | Ensembl id | Description |
|---|---|---|---|---|---|
| 1 | HLA-A*01:01_EVDPIGHLY | 1 | MAGA3 | ENSG00000221867 | Melanoma-associated antigen 3 (Antigen MZ2- |
| | | | | | D)(Cancer/testis antigen 1.3)(CT1.3)(MAGE-3 |
| | | | | | antigen) |
| 2 | HLA-A*29:02_FVQENYLEY | 2 | MAGA3 | ENSG00000221867 | Melanoma-associated antigen 3 (Antigen MZ2- |
| | | | | | D)(Cancer/testis antigen 1.3)(CT1.3)(MAGE-3 |
| | | | | | antigen) |
| 3 | HLA-A*29:02_LVHFLLLKY | 3 | MAGA3 | ENSG00000221867 | Melanoma-associated antigen 3 (Antigen MZ2- |
| | | | | | D)(Cancer/testis antigen 1.3)(CT1.3)(MAGE-3 |
| | | | | | antigen) |
| 4 | HLA-B*44:03_MEVDPIGHLY | 4 | MAGA3 | ENSG00000221867 | Melanoma-associated antigen 3 (Antigen MZ2- |
| | | | | | D)(Cancer/testis antigen 1.3)(CT1.3)(MAGE-3 |
| | | | | | antigen) |
| 5 | HLA-B*35:01_FPVQATIDF | 5 | DSCR6 | ENSG00000183145 | Protein ripply3 (Down syndrome critical region |
| | | | | | protein 6) |
| 6 | HLA-A*26:01_EVDPIGHLY | 1 | MAGA3 | ENSG00000221867 | Melanoma-associated antigen 3 (Antigen MZ2- |
| | | | | | D)(Cancer/testis antigen 1.3)(CT1.3)(MAGE-3 |
| | | | | | antigen) |
| 7 | HLA-A*26:01_EVDPIGHVY | 6 | MAGA6 | ENSG00000197172 | Melanoma-associated antigen 6 (Cancer/testis |
| | | | | | antigen 1.6)(CT1.6)(MAGE-6 antigen) |
| | | | | | (MAGE3B antigen) |
| 8 | HLA-A*29:02_FVQENYLEY | 2 | MAGA6 | ENSG00000197172 | Melanoma-associated antigen 6 (Cancer/testis |
| | | | | | antigen 1.6)(CT1.6)(MAGE-6 antigen) |
| | | | | | (MAGE3B antigen) |
| 9 | HLA-A29:02_LVHFLLLKY | 3 | MAGA6 | ENSG00000197172 | Melanoma-associated antigen 6 (Cancer/testis |
| | | | | | antigen 1.6)(CT1.6)(MAGE-6 antigen) |
| | | | | | (MAGE3B antigen) |
| 10 | HLA-B*44:03_MEVDPIGHVY | 7 | MAGA6 | ENSG00000197172 | Melanoma-associated antigen 6 (Cancer/testis |
| | | | | | antigen 1.6)(CT1.6)(MAGE-6 antigen) |
| | | | | | (MAGE3B antigen) |
| 11 | HLA-C*02:02_AEMLGSVVGNW | 8 | MAGA3 | ENSG00000221867 | Melanoma-associated antigen 3 (Antigen MZ2- |
| | | | | | D)(Cancer/testis antigen 1.3)(CT1.3)(MAGE-3 |
| | | | | | antigen) |
| 12 | HLA-C*02:02_AEMLGSVVGNW | 8 | MAGA6 | ENSG00000197172 | Melanoma-associated antigen 6 (Cancer/testis |
| | | | | | antigen 1.6)(CT1.6)(MAGE-6 antigen) |
| | | | | | (MAGE3B antigen) |
| 13 | HLA-A*01:01_EVDPIGHVY | 6 | MAGA6 | ENSG00000197172 | Melanoma-associated antigen 6 (Cancer/testis |
| | | | | | antigen 1.6)(CT1.6)(MAGE-6 antigen) |
| | | | | | (MAGE3B antigen) |
| 14 | HLA-B*44:02_AEMLERVIKNY | 9 | MAGA4 | ENSG00000147381 | Melanoma-associated antigen 4 (Cancer/testis |
| | | | | | antigen 1.4)(CT1.4)(MAGE-4 antigen)(MAGE- |
| | | | | | 41 antigen)(MAGE-X2 antigen) |
| 15 | HLA-B*44:03_AEMLERVIKNY | 9 | MAGA4 | ENSG00000147381 | Melanoma-associated antigen 4 (Cancer/testis |
| | | | | | antigen 1.4)(CT1.4)(MAGE-4 antigen)(MAGE- |
| | | | | | 41 antigen)(MAGE-X2 antigen) |
| 16 | HLA-C*02:02_AEMLERVIKNY | 9 | MAGA4 | ENSG00000147381 | Melanoma-associated antigen 4 (Cancer/testis |
| | | | | | antigen 1.4)(CT1.4)(MAGE-4 antigen)(MAGE- |
| | | | | | 41 antigen)(MAGE-X2 antigen) |
| 17 | HLA-B*44:03_AETSYVKVL | 10 | MAGA4 | ENSG00000147381 | Melanoma-associated antigen 4 (Cancer/testis |
| | | | | | antigen 1.4)(CT1.4)(MAGE-4 antigen)(MAGE- |
| | | | | | 41 antigen)(MAGE-X2 antigen) |
| 18 | HLA-A*02:01_ALLEEEEGV | 11 | MAGA4 | ENSG00000147381 | Melanoma-associated antigen 4 (Cancer/testis |
| | | | | | antigen 1.4)(CT1.4)(MAGE-4 antigen)(MAGE- |
| | | | | | 41 antigen)(MAGE-X2 antigen) |
| 19 | HLA-A*01:01_EVDPASNTY | 12 | MAGA4 | ENSG00000147381 | Melanoma-associated antigen 4 (Cancer/testis |
| | | | | | antigen 1.4)(CT1.4)(MAGE-4 antigen)(MAGE- |
| | | | | | 41 antigen)(MAGE-X2 antigen) |
| 20 | HLA-A*02:07_KVDELAHFL | 13 | MAGA4 | ENSG00000147381 | Melanoma-associated antigen 4 (Cancer/testis |
| | | | | | antigen 1.4)(CT1.4)(MAGE-4 antigen)(MAGE- |
| | | | | | 41 antigen)(MAGE-X2 antigen) |
| 21 | HLA-A*30:02_RQVPGSNPARY | 14 | MAGA4 | ENSG00000147381 | Melanoma-associated antigen 4 (Cancer/testis |
| | | | | | antigen 1.4)(CT1.4)(MAGE-4 antigen)(MAGE- |
| | | | | | 41 antigen)(MAGE-X2 antigen) |
| 22 | HLA-B*35:01_SALPTTISF | 15 | MAGA4 | ENSG00000147381 | Melanoma-associated antigen 4 (Cancer/testis |
| | | | | | antigen 1.4)(CT1.4)(MAGE-4 antigen)(MAGE- |
| | | | | | 41 antigen)(MAGE-X2 antigen) |
| 23 | HLA-B*46:01_SALPTTISF | 15 | MAGA4 | ENSG00000147381 | Melanoma-associated antigen 4 (Cancer/testis |
| | | | | | antigen 1.4)(CT1.4)(MAGE-4 antigen)(MAGE- |
| | | | | | 41 antigen)(MAGE-X2 antigen) |
| 24 | HLA-A*02:07_KVDELAHFLL | 16 | MAGA4 | ENSG00000147381 | Melanoma-associated antigen 4 (Cancer/testis |
| | | | | | antigen 1.4)(CT1.4)(MAGE-4 antigen)(MAGE- |
| | | | | | 41 antigen)(MAGE-X2 antigen) |
| 25 | HLA-A*02:01_ALFGLLVYL | 17 | CLD6 | ENSG00000184697 | Claudin-6 (Skullin) |
| 26 | HLA-A*11:01_STSAPAISR | 18 | CLD6 | ENSG00000184697 | Claudin-6 (Skullin) |
| 27 | HLA-C*02:02_KEVDPASNTY | 19 | MAGA4 | ENSG00000147381 | Melanoma-associated antigen 4 (Cancer/testis |
| | | | | | antigen 1.4)(CT1.4)(MAGE-4 antigen)(MAGE- |
| | | | | | 41 antigen)(MAGE-X2 antigen) |
| 28 | HLA-B*44:02_AEMLGSVIRNF | 20 | MAGAC | ENSG00000213401 | Melanoma-associated antigen 12 (Cancer/testis |
| | | | | | antigen 1.12)(CT1.12)(MAGE-12 antigen) |
| | | | | | (MAGE12F antigen) |
| 29 | HLA-C*02:02_AEMLGSVIRNF | 20 | MAGAC | ENSG00000213401 | Melanoma-associated antigen 12 (Cancer/testis |
| | | | | | antigen 1.12)(CT1.12)(MAGE-12 antigen) |
| | | | | | (MAGE12F antigen) |
| 30 | HLA-A*03:01_GLLGDNQIMPK | 21 | MAGA3 | ENSG00000221867 | Melanoma-associated antigen 3 (Antigen MZ2- |
| | | | | | D)(Cancer/testis antigen 1.3)(CT1.3)(MAGE-3 |
| | | | | | antigen) |
| 31 | HLA-B*44:02_AEMLGSVVGNW | 8 | MAGA3 | ENSG00000221867 | Melanoma-associated antigen 3 (Antigen MZ2- |
| | | | | | D)(Cancer/testis antigen 1.3)(CT1.3)(MAGE-3 |
| | | | | | antigen) |
| 32 | HLA-B*27:02_PRALVETSY | 22 | MAGA3 | ENSG00000221867 | Melanoma-associated antigen 3 (Antigen MZ2- |
| | | | | | D)(Cancer/testis antigen 1.3)(CT1.3)(MAGE-3 |
| | | | | | antigen) |
| 33 | HLA-A*01:01_NTDNNLAVY | 23 | KKLC1 | ENSG00000204019 | Kita-kyushu lung cancer antigen 1 (KK-LC-1) |
| | | | | | (Cancer/testis antigen 83) |
| 34 | HLA-B*44:03_AEMLGSVVGNW | 8 | MAGA3 | ENSG00000221867 | Melanoma-associated antigen 3 (Antigen MZ2- |
| | | | | | D)(Cancer/testis antigen 1.3)(CT1.3)(MAGE-3 |
| | | | | | antigen) |
| 35 | HLA-B*44:02_AEMLGSVVGNW | 8 | MAGA6 | ENSG00000197172 | Melanoma-associated antigen 6 (Cancer/testis |
| | | | | | antigen 1.6)(CT1.6)(MAGE-6 antigen) |
| | | | | | (MAGE3B antigen) |
| 36 | HLA-B*44:02_AEMLESVIKNY | 24 | MAGA1 | ENSG00000198681 | Melanoma-associated antigen 1 (Antigen MZ2-E) |
| | | | | | (Cancer/testis antigen 1.1)(CT1.1)(MAGE-1 |
| | | | | | antigen) |
| 37 | HLA-B*44:03_AEMLESVIKNY | 24 | MAGA1 | ENSG00000198681 | Melanoma-associated antigen 1 (Antigen MZ2-E) |
| | | | | | (Cancer/testis antigen 1.1)(CT1.1)(MAGE-1 |
| | | | | | antigen) |
| 38 | HLA-C*02:02_AEMLESVIKNY | 24 | MAGA1 | ENSG00000198681 | Melanoma-associated antigen 1 (Antigen MZ2-E) |
| | | | | | (Cancer/testis antigen 1.1)(CT1.1)(MAGE-1 |
| | | | | | antigen) |
| 39 | HLA-B*44:03_AETSYVKVL | 10 | MAGA1 | ENSG00000198681 | Melanoma-associated antigen 1 (Antigen MZ2-E) |
| | | | | | (Cancer/testis antigen 1.1)(CT1.1)(MAGE-1 |
| | | | | | antigen) |
| 40 | HLA-B*18:01_EELSVMEVY | 25 | MAGA1 | ENSG00000198681 | Melanoma-associated antigen 1 (Antigen MZ2-E) |
| | | | | | (Cancer/testis antigen 1.1)(CT1.1)(MAGE-1 |
| | | | | | antigen) |
| 41 | HLA-A*26:01_EVYDGREHSAY | 26 | MAGA1 | ENSG00000198681 | Melanoma-associated antigen 1 (Antigen MZ2-E) |
| | | | | | (Cancer/testis antigen 1.1)(CT1.1)(MAGE-1 |
| | | | | | antigen) |
| 42 | HLA-A*33:01_EYVIKVSAR | 27 | MAGA1 | ENSG00000198681 | Melanoma-associated antigen 1 (Antigen MZ2-E) |
| | | | | | (Cancer/testis antigen 1.1)(CT1.1)(MAGE-1 |
| | | | | | antigen) |
| 43 | HLA-A*02:01_KVLEYVIKV | 28 | MAGA1 | ENSG00000198681 | Melanoma-associated antigen 1 (Antigen MZ2-E) |
| | | | | | (Cancer/testis antigen 1.1)(CT1.1)(MAGE-1 |
| | | | | | antigen) |
| 44 | HLA-A*02:07_KVLEYVIKV | 28 | MAGA1 | ENSG00000198681 | Melanoma-associated antigen 1 (Antigen MZ2-E) |
| | | | | | (Cancer/testis antigen 1.1)(CT1.1)(MAGE-1 |
| | | | | | antigen) |
| 45 | HLA-A*29:02_LVGFLLLKY | 29 | MAGA1 | ENSG00000198681 | Melanoma-associated antigen 1 (Antigen MZ2-E) |
| | | | | | (Cancer/testis antigen 1.1)(CT1.1)(MAGE-1 |
| | | | | | antigen) |
| 46 | HLA-B*35:01_SAFPTTINF | 30 | MAGA1 | ENSG00000198681 | Melanoma-associated antigen 1 (Antigen MZ2-E) |
| | | | | | (Cancer/testis antigen 1.1)(CT1.1)(MAGE-1 |
| | | | | | antigen) |
| 47 | HLA-C*02:02_SAFPTTINF | 30 | MAGA1 | ENSG00000198681 | Melanoma-associated antigen 1 (Antigen MZ2-E) |
| | | | | | (Cancer/testis antigen 1.1)(CT1.1)(MAGE-1 |
| | | | | | antigen) |
| 48 | HLA-A*29:02_LVHFLLLKY | 3 | MAGAC | ENSG00000213401 | Melanoma-associated antigen 12 (Cancer/testis |
| | | | | | antigen 1.12)(CT1.12)(MAGE-12 antigen) |
| | | | | | (MAGE12F antigen) |
| 49 | HLA-A*30:02_STLPTTINY | 31 | MAGAC | ENSG00000213401 | Melanoma-associated antigen 12 (Cancer/testis |
| | | | | | antigen 1.12)(CT1.12)(MAGE-12 antigen) |
| | | | | | (MAGE12F antigen) |
| 50 | HLA-B*18:01_MEVDPIGHVY | 7 | MAGA6 | ENSG00000197172 | Melanoma-associated antigen 6 (Cancer/testis |
| | | | | | antigen 1.6)(CT1.6)(MAGE-6 antigen) |
| | | | | | (MAGE3B antigen) |
| 51 | HLA-B*51:01_DAAHPGPSV | 32 | PPBN | ENSG00000163286 | Alkaline phosphatase, placental-like (EC 3.1.3.1) |
| | | | | | (ALP-1)(Alkaline phosphatase Nagao isozyme) |
| | | | | | (Germ cell alkaline phosphatase)(GCAP) |
| | | | | | (Placental alkaline phosphatase-like)(PLAP-like) |
| 52 | HLA-B*35:01_FPMGTPDPEY | 33 | PPBN | ENSG00000163286 | Alkaline phosphatase, placental-like (EC 3.1.3.1) |
| | | | | | (ALP-1)(Alkaline phosphatase Nagao isozyme) |
| | | | | | (Germ cell alkaline phosphatase)(GCAP) |
| | | | | | (Placental alkaline phosphatase-like)(PLAP-like) |
| 53 | HLA-A*30:02_RVQHASPAGAY | 34 | PPBN | ENSG00000163286 | Alkaline phosphatase, placental-like (EC 3.1.3.1) |
| | | | | | (ALP-1)(Alkaline phosphatase Nagao isozyme) |
| | | | | | (Germ cell alkaline phosphatase)(GCAP) |
| | | | | | (Placental alkaline phosphatase-like)(PLAP-like) |
| 54 | HLA-A*02:07_SLDPSVTHL | 35 | PPBN | ENSG00000163286 | Alkaline phosphatase, placental-like (EC 3.1.3.1) |
| | | | | | (ALP-1)(Alkaline phosphatase Nagao isozyme) |
| | | | | | (Germ cell alkaline phosphatase)(GCAP) |
| | | | | | (Placental alkaline phosphatase-like)(PLAP-like) |
| 55 | HLA-A*30:02_VQHASPAGAY | 36 | PPBN | ENSG00000163286 | Alkaline phosphatase, placental-like (EC 3.1.3.1) |
| | | | | | (ALP-1)(Alkaline phosphatase Nagao isozyme) |
| | | | | | (Germ cell alkaline phosphatase)(GCAP) |
| | | | | | (Placental alkaline phosphatase-like)(PLAP-like) |
| 56 | HLA-A*30:02_EVDPIGHVY | 6 | MAGA6 | ENSG00000197172 | Melanoma-associated antigen 6 (Cancer/testis |
| | | | | | antigen 1.6)(CT1.6)(MAGE-6 antigen) |
| | | | | | (MAGE3B antigen) |
| 57 | HLA-A*29:02_IFLDFNHFY | 37 | PLCX2 | ENSG00000240891 | PI-PLC X domain-containing protein 2 |
| 58 | HLA-A*29:02_LVQEKYLEY | 38 | MAGA1 | ENSG00000198681 | Melanoma-associated antigen 1 (Antigen MZ2-E) |
| | | | | | (Cancer/testis antigen 1.1)(CT1.1)(MAGE-1 |
| | | | | | antigen) |
| 59 | HLA-A*30:02_RQVPDSDPARY | 39 | MAGA1 | ENSG00000198681 | Melanoma-associated antigen 1 (Antigen MZ2-E) |
| | | | | | (Cancer/testis antigen 1.1)(CT1.1)(MAGE-1 |
| | | | | | antigen) |
| 60 | HLA-B*44:03_AEMLGSVVGNW | 8 | MAGA6 | ENSG00000197172 | Melanoma-associated antigen 6 (Cancer/testis |
| | | | | | antigen 1.6)(CT1.6)(MAGE-6 antigen) |
| | | | | | (MAGE3B antigen) |
| 61 | HLA-A*02:01_FLWGPRALIET | 40 | MAGA6 | ENSG00000197172 | Melanoma-associated antigen 6 (Cancer/testis |
| | | | | | antigen 1.6)(CT1.6)(MAGE-6 antigen) |
| | | | | | (MAGE3B antigen) |
| 62 | HLA-A*02:01_FLWGPRALVET | 41 | MAGA3 | ENSG00000221867 | Melanoma-associated antigen 3 (Antigen MZ2- |
| | | | | | D)(Cancer/testis antigen 1.3)(CT1.3)(MAGE-3 |
| | | | | | antigen) |
| 63 | HLA-B*44:03_AEMLGSVIRNF | 20 | MAGAC | ENSG00000213401 | Melanoma-associated antigen 12 (Cancer/testis |
| | | | | | antigen 1.12)(CT1.12)(MAGE-12 antigen) |
| | | | | | (MAGE12F antigen) |
| 64 | HLA-A*29:02_LVQENYLEY | 42 | MAGAC | ENSG00000213401 | Melanoma-associated antigen 12 (Cancer/testis |
| | | | | | antigen 1.12)(CT1.12)(MAGE-12 antigen) |
| | | | | | (MAGE12F antigen) |
| 65 | HLA-A*26:01_EVLNAVGVY | 43 | MAGC2 | ENSG00000046774 | Melanoma-associated antigen C2 (Cancer/testis |
| | | | | | antigen 10)(CT10)(Hepatocellular carcinoma- |
| | | | | | associated antigen 587)(MAGE-C2 antigen) |
| | | | | | (MAGE-E1 antigen) |
| 66 | HLA-A*29:02_GAVSLLLRY | 44 | Q5T1G4 | ENSG00000204179 | Protein tyrosine phosphatase, non-receptor type |
| | | | | | 20A (Tyrosine-protein phosphatase non-receptor |
| | | | | | type 20)(Fragment) |
| 67 | HLA-A*02:07_LLDPVQRNL | 45 | ZN560 | ENSG00000198028 | Zinc finger protein 560 |
| 68 | HLA-C*04:01_TFDSVAVEF | 46 | ZN560 | ENSG00000198028 | Zinc finger protein 560 |
| 69 | HLA-A*01:01_YSDVMLENY | 47 | ZN560 | ENSG00000198028 | Zinc finger protein 560 |
| 70 | HLA-A*02:07_TLDEKVAEL | 48 | MAGC2 | ENSG00000046774 | Melanoma-associated antigen C2 (Cancer/testis |
| | | | | | antigen 10)(CT10)(Hepatocellular carcinoma- |
| | | | | | associated antigen 587)(MAGE-C2 antigen) |
| | | | | | (MAGE-E1 antigen) |
| 71 | HLA-B*51:01_TAFIGNSI | 49 | CLD6 | ENSG00000184697 | Claudin-6 (Skullin) |
| 72 | HLA-A*11:01_STLPTTINY | 31 | MAGAC | ENSG00000213401 | Melanoma-associated antigen 12 (Cancer/testis |
| | | | | | antigen 1.12)(CT1.12)(MAGE-12 antigen) |
| | | | | | (MAGE12F antigen) |
| 73 | HLA-C*04:01_AFDDIATYF | 50 | SSX1 | ENSG00000126752 | Protein SSX1 (Cancer/testis antigen 5.1)(CT5.1) |
| | | | | | (Synovial sarcoma, X breakpoint 1) |
| 74 | HLA-B*35:01_SPASDAYIVF | 51 | NACA2 | ENSG00000253506 | Nascent polypeptide-associated complex subunit |
| | | | | | alpha-2 (Alpha-NAC-like)(Horn s 2.01)(Nascent |
| | | | | | polypeptide-associated complex subunit alpha- |
| | | | | | like)(NAC-alpha-like) |
| 75 | HLA-A*30:02_VYKSPASDAY | 52 | NACA2 | ENSG00000253506 | Nascent polypeptide-associated complex subunit |
| | | | | | alpha-2 (Alpha-NAC-like)(Hom s 2.01)(Nascent |
| | | | | | polypeptide-associated complex subunit alpha- |
| | | | | | like)(NAC-alpha-like) |
| 76 | HLA-B*44:03_KEVDPASNTY | 19 | MAGA4 | ENSG00000147381 | Melanoma-associated antigen 4 (Cancer/testis |
| | | | | | antigen 1.4)(CT1.4)(MAGE-4 antigen)(MAGE- |
| | | | | | 41 antigen)(MAGE-X2 antigen) |
| 77 | HLA-A*30:02_AMNSLSAMY | 53 | DMBX1 | ENSG00000197587 | Diencephalon/mesencephalon homeobox protein |
| | | | | | 1 (Orthodenticle homolog 3)(Paired-like |
| | | | | | homeobox protein DMBX1) |
| 78 | HLA-A*11:01_ASQEDILLK | 54 | SMC1B | ENSG00000077935 | Structural maintenance of chromosomes protein |
| | | | | | 1B (SMC protein 1B)(SMC-1-beta)(SMC-1B) |
| 79 | HLA-A*11:01_ATMTQQLEK | 55 | SMC1B | ENSG00000077935 | Structural maintenance of chromosomes protein |
| | | | | | 1B (SMC protein 1B)(SMC-1-beta)(SMC-1B) |
| 80 | HLA-B*44:03_EEIGVENIREF | 56 | SMC1B | ENSG00000077935 | Structural maintenance of chromosomes protein |
| | | | | | 1B (SMC protein 1B)(SMC-1-beta)(SMC-1B) |
| 81 | HLA-A*11:01_GTVESISVKK | 57 | SMC1B | ENSG00000077935 | Structural maintenance of chromosomes protein |
| | | | | | 1B (SMC protein 1B)(SMC-1-beta)(SMC-1B) |
| 82 | HLA-A*30:02_STSGELIGEY | 58 | SMC1B | ENSG00000077935 | Structural maintenance of chromosomes protein |
| | | | | | 1B (SMC protein 1B)(SMC-1-beta)(SMC-1B) |
| 83 | HLA-A*24:02_VYIAELEKI | 59 | SMC1B | ENSG00000077935 | Structural maintenance of chromosomes protein |
| | | | | | 1B (SMC protein 1B)(SMC-1-beta)(SMC-1B) |
| 84 | HLA-A*11:01_AGQDLSAYLLK | 60 | ACTL8 | ENSG00000117148 | Actin-like protein 8 (Cancer/testis antigen 57) |
| | | | | | (CT57) |
| 85 | HLA-A*26:01_SVVAHLSTY | 61 | ACTL8 | ENSG00000117148 | Actin-like protein 8 (Cancer/testis antigen 57) |
| | | | | | (CT57) |
| 86 | HLA-A*11:01_AAAGVSSTK | 62 | MAGB2 | ENSG00000099399 | Melanoma-associated antigen B2 (Cancer/testis |
| | | | | | antigen 3.2)(CT3.2)(DSS-AHC critical interval |
| | | | | | MAGE superfamily 6)(DAM6)(MAGE XP-2 |
| | | | | | antigen)(MAGE-B2 antigen) |
| 87 | HLA-A*30:02_KVNPNGHTY | 63 | MAGB2 | ENSG00000099399 | Melanoma-associated antigen B2 (Cancer/testis |
| | | | | | antigen 3.2)(CT3.2)(DSS-AHC critical interval |
| | | | | | MAGE superfamily 6)(DAM6)(MAGE XP-2 |
| | | | | | antigen)(MAGE-B2 antigen) |
| 88 | HLA-B*44:02_AEILESVIRNY | 64 | MAGAA | ENSG00000124260 | Melanoma-associated antigen 10 (Cancer/testis |
| | | | | | antigen 1.10)(CT1.10)(MAGE-10 antigen) |
| 89 | HLA-B*44:03_AEILESVIRNY | 64 | MAGAA | ENSG00000124260 | Melanoma-associated antigen 10 (Cancer/testis |
| | | | | | antigen 1.10)(CT1.10)(MAGE-10 antigen) |
| 90 | HLA-C*02:02_AEILESVIRNY | 64 | MAGAA | ENSG00000124260 | Melanoma-associated antigen 10 (Cancer/testis |
| | | | | | antigen 1.10)(CT1.10)(MAGE-10 antigen) |
| 91 | HLA-A*30:02_RQVPGSDPARY | 65 | MAGAA | ENSG00000124260 | Melanoma-associated antigen 10 (Cancer/testis |
| | | | | | antigen 1.10)(CT1.10)(MAGE-10 antigen) |
| 92 | HLA-C*01:02_SSPSVVASL | 66 | MAGAA | ENSG00000124260 | Melanoma-associated antigen 10 (Cancer/testis |
| | | | | | antigen 1.10)(CT1.10)(MAGE-10 antigen) |
| 93 | HLA-A*01:01_LLDPAQRNLY | 67 | ZN560 | ENSG00000198028 | Zinc finger protein 560 |
| 94 | HLA-A*26:01_EVDPASNTY | 12 | MAGA4 | ENSG00000147381 | Melanoma-associated antigen 4 (Cancer/testis |
| | | | | | antigen 1.4)(CT1.4)(MAGE-4 antigen)(MAGE- |
| | | | | | 41 antigen)(MAGE-X2 antigen) |
| 95 | HLA-A*26:01_FVQENYLEY | 2 | MAGA6 | ENSG00000197172 | Melanoma-associated antigen 6 (Cancer/testis |
| | | | | | antigen 1.6)(CT 1.6)(MAGE-6 antigen) |
| | | | | | (MAGE3B antigen) |
| 96 | HLA-C*02:02_MEVDPIGHVY | 7 | MAGA6 | ENSG00000197172 | Melanoma-associated antigen 6 (Cancer/testis |
| | | | | | antigen 1.6)(CT1.6)(MAGE-6 antigen) |
| | | | | | (MAGE3B antigen) |
| 97 | HLA-C*16:01_SALPTTISF | 15 | MAGA4 | ENSG00000147381 | Melanoma-associated antigen 4 (Cancer/testis |
| | | | | | antigen 1.4)(CT1.4)(MAGE-4 antigen)(MAGE- |
| | | | | | 41 antigen)(MAGE-X2 antigen) |
| 98 | HLA-A*01:01_LTDQPSAY | 68 | V9GYR9 | ENSG00000225362 | Cancer/testis antigen 62 (Fragment) |
| 99 | HLA-C*04:01_AFDVASFL | 69 | STRA8 | ENSG00000146857 | Stimulated by retinoic acid gene 8 protein |
| | | | | | homolog |
| 100 | HLA-A*30:02_SSLPTTMNY | 70 | MAGA3 | ENSG00000221867 | Melanoma-associated antigen 3 (Antigen MZ2- |
| | | | | | D)(Cancer/testis antigen 1.3)(CT1.3)(MAGE-3 |
| | | | | | antigen) |
| 101 | HLA-B*44:03_EEIIPLNRIY | 71 | TDRD1 | ENSG00000095627 | Tudor domain-containing protein 1 (Cancer/testis |
| | | | | | antigen 41.1)(CT41.1) |
| 102 | HLA-A*01:01_TSDTDVEVLY | 72 | TDRD1 | ENSG00000095627 | Tudor domain-containing protein 1 (Cancer/testis |
| | | | | | antigen 41.1)(CT41.1) |
| 103 | HLA-A*29:02_TFQDILLEARY | 73 | DMBX1 | ENSG00000197587 | Diencephalon/mesencephalon homeobox protein |
| | | | | | 1 (Orthodenticle homolog 3)(Paired-like |
| | | | | | homeobox protein DMBX1) |
| 104 | HLA-A*29:02_YFVQENYLEY | 74 | MAGA6 | ENSG00000197172 | Melanoma-associated antigen 6 (Cancer/testis |
| | | | | | antigen 1.6)(CT1.6)(MAGE-6 antigen) |
| | | | | | (MAGE3B antigen) |
| 105 | HLA-A*29:02_WVQENYLEY | 75 | MAGA4 | ENSG00000147381 | Melanoma-associated antigen 4 (Cancer/testis |
| | | | | | antigen 1.4)(CT1.4)(MAGE-4 antigen)(MAGE- |
| | | | | | 41 antigen)(MAGE-X2 antigen) |
| 106 | HLA-A*33:01_EVRDYVEER | 76 | GBG1 | ENSG00000127928 | Guanine nucleotide-binding protein G(T) subunit |
| | | | | | gamma-T1 (Transducin gamma chain) |
| 107 | HLA-C*16:01_SAFPTTINF | 30 | MAGA1 | ENSG00000198681 | Melanoma-associated antigen 1 (Antigen MZ2-E) |
| | | | | | (Cancer/testis antigen 1.1)(CT1.1)(MAGE-1 |
| | | | | | antigen) |
| 108 | HLA-A*02:07_ALFGLLVYL | 17 | CLD6 | ENSG00000184697 | Claudin-6 (Skullin) |
| 109 | HLA-A*02:01_VLTSGIVFV | 77 | CLD6 | ENSG00000184697 | Claudin-6 (Skullin) |
| 110 | HLA-B*35:01_FVQENYLEY | 2 | MAGA6 | ENSG00000197172 | Melanoma-associated antigen 6 (Cancer/testis |
| | | | | | antigen 1.6)(CT1.6)(MAGE-6 antigen) |
| | | | | | (MAGE3B antigen) |
| 111 | HLA-B*51:01_NALSSLKI | 78 | CX7B2 | ENSG00000170516 | Cytochrome c oxidase subunit 7B2, |
| | | | | | mitochondrial (Cytochrome c oxidase |
| | | | | | polypeptide VIIb2) |
| 112 | HLA-B*35:01_NAVLASGTAF | 79 | CX7B2 | ENSG00000170516 | Cytochrome c oxidase subunit 7B2, |
| | | | | | mitochondrial (Cytochrome c oxidase |
| | | | | | polypeptide VIIb2) |
| 113 | HLA-B*27:02_PRALVETSY | 22 | MAGAC | ENSG00000213401 | Melanoma-associated antigen 12 (Cancer/testis |
| | | | | | antigen 1.12)(CT1.12)(MAGE-12 antigen) |
| | | | | | (MAGE12F antigen) |
| 114 | HLA-A*11:01_ASAPPQKQK | 80 | PABP3 | ENSG00000151846 | Polyadenylate-binding protein 3 (PABP-3) |
| | | | | | (Poly(A)-binding protein 3)(Testis-specific |
| | | | | | poly(A)-binding protein) |
| 115 | HLA-A*01:01_EIDNSELLY | 81 | PABP3 | ENSG00000151846 | Polyadenylate-binding protein 3 (PABP-3) |
| | | | | | (Poly(A)-binding protein 3)(Testis-specific |
| | | | | | poly(A)-binding protein) |
| 116 | HLA-A*02:07_KVDEAVAVL | 82 | PABP3 | ENSG00000151846 | Polyadenylate-binding protein 3 (PABP-3) |
| | | | | | (Poly(A)-binding protein 3)(Testis-specific |
| | | | | | poly(A)-binding protein) |
| 117 | HLA-A*33:01_NGKQIYVGR | 83 | PABP3 | ENSG00000151846 | Polyadenylate-binding protein 3 (PABP-3) |
| | | | | | (Poly(A)-binding protein 3)(Testis-specific |
| | | | | | poly(A)-binding protein) |
| 118 | HLA-B*51:01_SPAGPILSI | 84 | PABP3 | ENSG00000151846 | Polyadenylate-binding protein 3 (PABP-3) |
| | | | | | (Poly(A)-binding protein 3)(Testis-specific |
| | | | | | poly(A)-binding protein) |
| 119 | HLA-B*35:01_LPYASTLGY | 85 | SOX14 | ENSG00000168875 | Transcription factor SOX-14 (Protein SOX-28) |
| 120 | HLA-A*26:01_DVADKLVTF | 86 | TDRD1 | ENSG00000095627 | Tudor domain-containing protein 1 (Cancer/testis |
| | | | | | antigen 41.1)(CT41.1) |
| 121 | HLA-A*11:01_GTVESISVK | 87 | SMC1B | ENSG00000077935 | Structural maintenance of chromosomes protein |
| | | | | | 1B (SMC protein 1B)(SMC-1-beta)(SMC-1B) |
| 122 | HLA-B*18:01_IENQAVPAF | 88 | X6RD31 | ENSG00000234068 | P antigen family member 2 (Fragment) |
| 123 | HLA-A*03:01_AVLQKFLEH | 89 | MSLNL | ENSG00000162006 | Mesothelin-like protein (Pre-pro-megakaryocyte- |
| | | | | | potentiating-factor-like) |
| 124 | HLA-B*35:01_QPAAPGPAL | 90 | MSLNL | ENSG00000162006 | Mesothelin-like protein (Pre-pro-megakaiyocyte- |
| | | | | | potentiating-factor-like) |
| 125 | HLA-B*18:01_DEDQAMRAF | 91 | NALP7 | ENSG00000167634 | NACHT, LRR and PYD domains-containing |
| | | | | | protein 7 (Nucleotide-binding oligomerization |
| | | | | | domain protein 12)(PYRIN-containing APAE1- |
| | | | | | like protein 3) |
| 126 | HLA-B*35:01_NPIGDTGVKF | 92 | NALP7 | ENSG00000167634 | NACHT, LRR and PYD domains-containing |
| | | | | | protein 7 (Nucleotide-binding oligomerization |
| | | | | | domain protein 12)(PYRIN-containing APAE1- |
| | | | | | like protein 3) |
| 127 | HLA-C*05:01_NADLQSEF | 93 | V9GYR9 | ENSG00000225362 | Cancer/testis antigen 62 (Fragment) |
| 128 | HLA-B*44:03_SEVSFLEYY | 94 | PIWL1 | ENSG00000125207 | Piwi-like protein 1 (EC 3.1.26.-) |
| 129 | HLA-A*02:01_SLSNRLYYL | 95 | PIWL1 | ENSG00000125207 | Piwi-like protein 1 (EC 3.I.26.-) |
| 130 | HLA-B*44:02_AEMLESVIKNY | 24 | A0A075B7A9 | ENSG00000267978 | Melanoma-associated antigen 9 (Fragment) |
| 131 | HLA-B*44:03_AEMLESVIKNY | 24 | A0A075B7A9 | ENSG00000267978 | Melanoma-associated antigen 9 (Fragment) |
| 132 | HLA-C*02:02_AEMLESVIKNY | 24 | A0A075B7A9 | ENSG00000267978 | Melanoma-associated antigen 9 (Fragment) |
| 133 | HLA-A*02:01_GVYDGEEHSV | 96 | MAGB2 | ENSG00000099399 | Melanoma-associated antigen B2 (Cancer/testis |
| | | | | | antigen 3.2)(CT3.2)(DSS-AHC critical interval |
| | | | | | MAGE supmfamily 6)(DAM6)(MAGE XP-2 |
| | | | | | antigen)(MAGE-B2 antigen) |
| 134 | HLA-B*51:01_DANFIPTV | 97 | V9GZ46 | ENSG00000124092 | Transcriptional repressor CTCFL |
| 135 | HLA-A*30:02_SSLPTTMNY | 70 | MAGA6 | ENSG00000197172 | Melanoma-associated antigen 6 (Cancer/testis |
| | | | | | antigen 1.6)(CT1.6)(MAGE-6 antigen) |
| | | | | | (MAGE3B antigen) |
| 136 | HLA-B*44:03_EELGVMGVY | 98 | MAGA4 | ENSG00000147381 | Melanoma-associated antigen 4 (Cancer/testis |
| | | | | | antigen 1.4)(CT1.4)(MAGE-4 antigen)(MAGE- |
| | | | | | 41 antigen)(MAGE-X2 antigen) |
| 137 | HLA-B*51:01_YPREGSEV | 99 | FOXI3 | ENSG00000214336 | Forkhead box protein I3 |
| 138 | HLA-B*27:02_GLLGDNQIMPK | 21 | MAGA3 | ENSG00000221867 | Melanoma-associated antigen 3 (Antigen MZ2- |
| | | | | | D)(Cancer/testis antigen 1.3)(CT1.3)(MAGE-3 |
| | | | | | antigen) |
| 139 | HLA-A*11:01_ATDLHGVSR | 100 | LGSN | ENSG00000146166 | Lengsin (Glutamate-ammonia ligase domain- |
| | | | | | containing protein 1)(Lens glutamine synthase- |
| | | | | | like) |
| 140 | HLA-B*44:02_TEQLTITGKKW | 101 | LGSN | ENSG00000146166 | Lengsin (Glutamate-ammonia ligase domain- |
| | | | | | containing protein 1)(Lens glutamine synthase- |
| | | | | | like) |
| 141 | HLA-B*44:03_TEQLTITGKKW | 101 | LGSN | ENSG00000146166 | Lengsin (Glutamate-ammonia ligase domain- |
| | | | | | containing protein 1)(Lens glutamine synthase- |
| | | | | | like) |
| 142 | HLA-B*44:02_AEIEPVSAVW | 102 | ZFP42 | ENSG00000179059 | Zinc finger protein 42 homolog (Zfp-42) |
| | | | | | (Reduced expression protein 1)(REX-1)(hREX- |
| | | | | | 1)(Zinc finger protein 754) |
| 143 | HLA-B*44:03_AEIEPVSAVW | 102 | ZFP42 | ENSG00000179059 | Zinc finger protein 42 homolog (Zfp-42) |
| | | | | | (Reduced expression protein 1)(REX-1)(hREX- |
| | | | | | 1)(Zinc finger protein 754) |
| 144 | HLA-C*02:02_AEIEPVSAVW | 102 | ZFP42 | ENSG00000179059 | Zinc finger protein 42 homolog (Zfp-42) |
| | | | | | (Reduced expression protein 1)(REX-1)(hREX- |
| | | | | | 1)(Zinc finger protein 754) |
| 145 | HLA-B*44:02_SEQQLSQKVF | 103 | ZFP42 | ENSG00000179059 | Zinc finger protein 42 homolog (Zfp-42) |
| | | | | | (Reduced expression protein 1)(REX-1)(hREX- |
| | | | | | 1)(Zinc finger protein 754) |
| 146 | HLA-B*44:03_SEQQLSQKVF | 103 | ZFP42 | ENSG00000179059 | Zinc finger protein 42 homolog (Zfp-42) |
| | | | | | (Reduced expression protein 1)(REX-1)(hREX- |
| | | | | | 1)(Zinc finger protein 754) |
| 147 | HLA-C*02:02_SEQQLSQKVF | 103 | ZFP42 | ENSG00000179059 | Zinc finger protein 42 homolog (Zfp-42) |
| | | | | | (Reduced expression protein 1)(REX-1)(hREX- |
| | | | | | 1)(Zinc finger protein 754) |
| 148 | HLA-A*01:01_LLDPVQRNLY | 104 | ZN560 | ENSG00000198028 | Zinc finger protein 560 |
| 149 | HLA-A*29:02_LYSDINITY | 105 | NPFF2 | ENSG00000056291 | Neuropeptide FF receptor 2 (G-protein coupled |
| | | | | | receptor 74)(G-protein coupled receptor |
| | | | | | HLWAR77)(Neuropeptide G-protein coupled |
| | | | | | receptor) |
| 150 | HLA-C*05:01_YADLSPNEL | 106 | NPFF2 | ENSG00000056291 | Neuropeptide FF receptor 2 (G-protein coupled |
| | | | | | receptor 74)(G-protein coupled receptor |
| | | | | | HLWAR77)(Neuropeptide G-protein coupled |
| | | | | | receptor) |
| 151 | HLA-B*51:01_YPFKPKLTI | 107 | NPFF2 | ENSG00000056291 | Neuropeptide FF receptor 2 (G-protein coupled |
| | | | | | receptor 74)(G-protein coupled receptor |
| | | | | | HLWAR77)(Neuropeptide G-protein coupled |
| | | | | | receptor) |
| 152 | HLA-A*01:01_YSDINITYVNY | 108 | NPFF2 | ENSG00000056291 | Neuropeptide FF receptor 2 (G-protein coupled |
| | | | | | receptor 74)(G-protein coupled receptor |
| | | | | | HLWAR77)(Neuropeptide G-protein coupled |
| | | | | | receptor) |
| 153 | HLA-A*01:01_YSDINITY | 109 | NPFF2 | ENSG00000056291 | Neuropeptide FF receptor 2 (G-protein coupled |
| | | | | | receptor 74)(G-protein coupled receptor |
| | | | | | HLWAR77)(Neuropeptide G-protein coupled |
| | | | | | receptor) |
| 154 | HLA-A*31:01_QVKIWFQNR | 110 | NKX12 | ENSG00000229544 | NK1 transcription factor-related protein 2 |
| | | | | | (Homeobox protein SAX-1)(NKX-1.1) |
| 155 | HLA-B*51:01_TPFYAPRL | 111 | NKX12 | ENSG00000229544 | NK1 transcription factor-related protein 2 |
| | | | | | (Homeobox protein SAX-1)(NKX-1.1) |
| 156 | HLA-A*11:01_GTMKIHILQK | 112 | V9GZ46 | ENSG00000124092 | Transcriptional repressor CTCFL |
| 157 | HLA-A*29:02_SYFITSLSY | 113 | NPBW1 | ENSG00000183729 | Neuropeptides B/W receptor type 1 (G-protein |
| | | | | | coupled receptor 7) |
| 158 | HLA-B*35:01_SALDESNTY | 114 | ACTL8 | ENSG00000117148 | Actin-like protein 8 (Cancer/testis antigen 57) |
| | | | | | (CT57) |
| 159 | HLA-B*18:01_IESEPLFTY | 115 | MAGC1 | ENSG00000155495 | Melanoma-associated antigen C1 (Cancer/testis |
| | | | | | antigen 7.1)(CT7.1)(MAGE-C1 antigen) |
| 160 | HLA-B*18:01_DEALGGTAF | 116 | TERT | ENSG00000164362 | Telomerase reverse transcriptase (EC 2.7.7.49) |
| | | | | | (HEST2)(Telomerase catalytic subunit) |
| | | | | | (Telomerase-associated protein 2)(TP2) |
| 161 | HLA-A*26:01_EVQSDYSSY | 117 | TERT | ENSG00000164362 | Telomerase reverse transcriptase (EC 2.7.7.49) |
| | | | | | (HEST2)(Telomerase catalytic subunit) |
| | | | | | (Telomerase-associated protein 2)(TP2) |
| 162 | HLA-A*29:02_GLFDVFLRF | 118 | TERT | ENSG00000164362 | Telomerase reverse transcriptase (EC 2.7.7.49) |
| | | | | | (HEST2)(Telomerase catalytic subunit) |
| | | | | | (Telomerase-associated protein 2)(TP2) |
| 163 | HLA-C*01:02_VVIEQSSSL | 119 | TERT | ENSG00000164362 | Telomerase reverse transcriptase (EC 2.7.7.49) |
| | | | | | (HEST2)(Telomerase catalytic subunit) |
| | | | | | (Telomerase-associated protein 2)(TP2) |
| 164 | HLA-A*11:01_SALGVTITK | 120 | ROP1A | ENSG00000065371 | Ropporin-1A (Cancer/testis antigen 91)(CT91) |
| | | | | | (Rhophilin-associated protein 1A) |
| 165 | HLA-A*11:01_GTASLTLPPK | 121 | CA094 | ENSG00000142698 | Uncharacterized protein C1orf94 |
| 166 | HLA-B*44:03_VEVDGPELKF | 122 | CA094 | ENSG00000142698 | Uncharacterized protein C1orf94 |
| 167 | HLA-B*51:01_DAYKFAADV | 123 | BRDT | ENSG00000137948 | Bromodomain testis-specific protein |
| | | | | | (Cancer/testis antigen 9)(CT9)(RING3-like |
| | | | | | protein) |
| 168 | HLA-A*33:01_DVNNQLNSR | 124 | BRDT | ENSG00000137948 | Bromodomain testis-specific protein |
| | | | | | (Cancer/testis antigen 9)(CT9)(RING3-like |
| | | | | | protein) |
| 169 | HLA-B*35:01_IPIEPVESM | 125 | BRDT | ENSG00000137948 | Brodomain testis-specific protein |
| | | | | | (Cancer/testis antigen 9)(CT9)(RING3-like |
| | | | | | protein) |
| 170 | HLA-A*11:01_SSQTAAQVTK | 126 | BRDT | ENSG00000137948 | Brodomain testis-specific protein |
| | | | | | (Cancer/testis antigen 9)(CT9)(RING3-like |
| | | | | | protein) |
| 171 | HLA-C*01:02_QSPQGASAL | 127 | MAGA4 | ENSG00000147381 | Melanoma-associated antigen 4 (Cancer/testis |
| | | | | | antigen 1.4)(CT1.4)(MAGE-4 antigen)(MAGE- |
| | | | | | 41 antigen)(MAGE-X2 antigen) |
| 172 | HLA-B*46:01_AVLASGTAF | 128 | CX7B2 | ENSG00000170516 | Cytochrome c oxidase subunit 7B2, |
| | | | | | mitochondrial (Cytochrome c oxidase |
| | | | | | polypeptide VIIb2) |
| 173 | HLA-A*26:01_EVVEGKEWGSF | 129 | NPSR1 | ENSG00000187258 | Neuropeptide S receptor (G-protein coupled |
| | | | | | receptor 154)(G-protein coupled receptor |
| | | | | | PGR14)(G-protein coupled receptor for asthma |
| | | | | | susceptibility) |
| 174 | HLA-A*01:01_NSAINPLIY | 130 | NPSR1 | ENSG00000187258 | Neuropeptide S receptor (G-protein coupled |
| | | | | | receptor 154)(G-protein coupled receptor |
| | | | | | PGR14)(G-protein coupled receptor for asthma |
| | | | | | susceptibility) |
| 175 | HLA-A*29:02_RYLQVVLLY | 131 | NPSR1 | ENSG00000187258 | Neuropeptide S receptor (G-protein coupled |
| | | | | | receptor 154)(G-protein coupled receptor |
| | | | | | PGR14)(G-protein coupled receptor for asthma |
| | | | | | susceptibility) |
| 176 | HLA-A*29:02_FQNPHGETLLY | 132 | NPFF2 | ENSG00000056291 | Neuropeptide FF receptor 2 (G-protein coupled |
| | | | | | receptor 74)(G-protein coupled receptor |
| | | | | | HLWAR77)(Neuropeptide G-protein coupled |
| | | | | | receptor) |
| 177 | HLA-A*11:01_SVMDLVGSILK | 133 | LDHC | ENSG00000166796 | L-lactate dehydrogenase C chain (LDH-C)(EC |
| | | | | | 1.1.1.27)(Cancer/testis antigen 32)(CT32)(LDH |
| | | | | | testis subunit)(LDH-X) |
| 178 | HLA-A*33:01_EVRDMSEHVTR | 134 | PAGE5 | ENSG00000158639 | P antigen family member 5 (PAGE-5) |
| | | | | | (Cancer/testis antigen 16.1)(CT16.1)(G antigen |
| | | | | | family E member 1)(Prostate-associated gene 5 |
| | | | | | protein) |
| 179 | HLA-A*30:02_AALASVGHLY | 135 | ONEC3 | ENSG00000205922 | One cut domain family member 3 (One cut |
| | | | | | homeobox 3)(Transcription factor ONECUT-3) |
| | | | | | (OC-3) |
| 180 | HLA-A*01:01_VTESESGSPEY | 136 | PPBN | ENSG00000163286 | Alkaline phosphatase, placental-like (EC 3.1.3.1) |
| | | | | | (ALP-1)(Alkaline phosphatase Nagao isozyme) |
| | | | | | (Germ cell alkaline phosphatase)(GCAP) |
| | | | | | (Placental alkaline phosphatase-like)(PLAP-like) |
| 181 | HLA-A*02:07_SIDWFMVTV | 137 | PLAC1 | ENSG00000170965 | Placenta-specific protein 1 |
| 182 | HLA-B*18:01_LEEEVVTF | 138 | TDRD1 | ENSG00000095627 | Tudor domain-containing protein 1 (Cancer/testis |
| | | | | | antigen 41.1)(CT41.1) |
| 183 | HLA-A*26:01_FVQENYLEY | 2 | MAGA3 | ENSG00000221867 | Melanoma-associated antigen 3 (Antigen MZ2- |
| | | | | | D)(Cancer/testis antigen 1.3)(CT1.3)(MAGE-3 |
| | | | | | antigen) |
| 184 | HLA-A*29:02_LVQEKYLEY | 38 | MAGB2 | ENSG00000099399 | Melanoma-associated antigen B2 (Cancer/testis |
| | | | | | antigen 3.2)(CT3.2)(DSS-AHC critical interval |
| | | | | | MAGE supeifamily 6)(DAM6)(MAGE XP-2 |
| | | | | | antigen)(MAGE-B2 antigen) |
| 185 | HLA-B*35:01_NASGPDPAL | 139 | NPBW1 | ENSG00000183729 | Neuropeptides B/W receptor type 1 (G-protein |
| | | | | | coupled receptor 7) |
| 186 | HLA-C*01:02_QSPQGASSL | 140 | MAGA3 | ENSG00000221867 | Melanoma-associated antigen 3 (Antigen MZ2- |
| | | | | | D)(Cancer/testis antigen 1.3)(CT1.3)(MAGE-3 |
| | | | | | antigen) |
| 187 | HLA-B*44:03_SESEMFPKF | 141 | BRDT | ENSG00000137948 | Brodomain testis-specific protein |
| | | | | | (Cancer/testis antigen 9)(CT9)(RING3-like |
| | | | | | protein) |
| 188 | HLA-A*29:02_NFQGIRFHY | 142 | FATE1 | ENSG00000147378 | Fetal and adult testis-expressed transcript protein |
| | | | | | (Cancer/testis antigen 43)(CT43)(Tumor antigen |
| | | | | | BJ-HCC-2) |
| 189 | HLA-B*51:01_DAAVTHSI | 143 | SAGE1 | ENSG00000181433 | Sarcoma antigen 1 (Cancer/testis antigen 14) |
| | | | | | (CT14) |
| 190 | HLA-A*24:02_LYKPDSNEF | 144 | SAGE1 | ENSG00000181433 | Sarcoma antigen 1 (Cancer/testis antigen 14) |
| | | | | | (CT14) |
| 191 | HLA-B*35:01_MAAAGIPSM | 145 | SAGE1 | ENSG00000181433 | Sarcoma antigen 1 (Cancer/testis antigen 14) |
| | | | | | (CT14) |
| 192 | HLA-B*35:01_MAAGGIPSM | 146 | SAGE1 | ENSG00000181433 | Sarcoma antigen 1 (Cancer/testis antigen 14) |
| | | | | | (CT14) |
| 193 | HLA-B*35:01_MAATPIPAM | 147 | SAGE1 | ENSG00000181433 | Sarcoma antigen 1 (Cancer/testis antigen 14) |
| | | | | | (CT14) |
| 194 | HLA-B*44:03_NEFAVGTKNY | 148 | SAGE1 | ENSG00000181433 | Sarcoma antigen 1 (Cancer/testis antigen 14) |
| | | | | | (CT14) |
| 195 | HLA-C*02:02_NEFAVGTKNY | 148 | SAGE1 | ENSG00000181433 | Sarcoma antigen 1 (Cancer/testis antigen 14) |
| | | | | | (CT14) |
| 196 | HLA-A*24:02_QYAAVTHNI | 149 | SAGE1 | ENSG00000181433 | Sarcoma antigen 1 (Cancer/testis antigen 14) |
| | | | | | (CT14) |
| 197 | HLA-A*03:01_SLFRAVITK | 150 | MAGA1 | ENSG00000198681 | Melanoma-associated antigen 1 (Antigen MZ2-E) |
| | | | | | (Cancer/testis antigen 1.1)(CT1.1)(MAGE-1 |
| | | | | | antigen) |
| 198 | HLA-A*29:02_FFLPVSVVY | 151 | NMUR2 | ENSG00000132911 | Neuromectin-U receptor 2 (NMU-R2)(G-protein |
| | | | | | coupled receptor FM-4)(G-protein coupled |
| | | | | | receptor TGR-1) |
| 199 | HLA-A*24:02_IYGFFNENF | 152 | NPFF2 | ENSG00000056291 | Neuropeptide FF receptor 2 (G-protein coupled |
| | | | | | receptor 74)(G-protein coupled receptor |
| | | | | | HLWAR77)(Neuropeptide G-protein coupled |
| | | | | | receptor) |
| 200 | HLA-A*33:01_DYIHKNDNVQR | 153 | PIWL1 | ENSG00000125207 | Piwi-like protein 1 (EC 3.1.26.-) |
| 201 | HLA-C*02:02_SALPTTISF | 15 | MAGA4 | ENSG00000147381 | Melanoma-associated antigen 4 (Cancer/testis |
| | | | | | antigen 1.4)(CT1.4)(MAGE-4 antigen)(MAGE- |
| | | | | | 41 antigen)(MAGE-X2 antigen) |
| 202 | HLA-B*51:01_IPALPLPTI | 154 | DPPA2 | ENSG00000163530 | Developmental pluripotency-associated protein 2 |
| | | | | | (Pluripotent embryonic stem cell-related gene 1 |
| | | | | | protein) |
| 203 | HLA-A*11:01_STSDVKLEK | 155 | DPPA2 | ENSG00000163530 | Developmental pluripotency-associated protein 2 |
| | | | | | (Pluripotent embryonic stem cell-related gene 1 |
| | | | | | protein) |
| 204 | HLA-B*44:03_AEARPVPHW | 156 | ACHA9 | ENSG00000174343 | Neuronal acetylcholine receptor subunit alpha-9 |
| | | | | | (Nicotinic acetylcholine receptor subunit alpha-9) |
| | | | | | (NACHR alpha-9) |
| 205 | HLA-B*35:01_MPAVKNVISY | 157 | ACHA9 | ENSG00000174343 | Neuronal acetylcholine receptor subunit alpha-9 |
| | | | | | (Nicotinic acetylcholine receptor subunit alpha-9) |
| | | | | | (NACHR alpha-9) |
| 206 | HLA-B*46:01_SAFPTTINF | 30 | MAGA1 | ENSG00000198681 | Melanoma-associated antigen 1 (Antigen MZ2-E) |
| | | | | | (Cancer/testis antigen 1.1)(CT1.1)(MAGE-1 |
| | | | | | antigen) |
| 207 | HLA-B*35:01_SPFSGGPVSF | 158 | P5F1B | ENSG00000212993 | Putative POU domain, class 5, transcription |
| | | | | | factor 1B (Oct4-pg1)(Octamer-binding protein 3- |
| | | | | | like)(Octamer-binding transcription factor 3-like) |
| 208 | HLA-B*35:01_TAAPATLEL | 159 | MESP2 | ENSG00000188095 | Mesoderm posterior protein 2 (Class C basic |
| | | | | | helix-loop-helix protein 6)(bHLHc6) |
| 209 | HLA-B*46:01_TAAAPGSPF | 160 | NKX12 | ENSG00000229544 | NK1 transcription factor-related protein 2 |
| | | | | | (Homeobox protein SAX-1)(NKX-1.1) |
| 210 | HLA-B*46:01_IAKVTGVAF | 161 | J3KR52 | ENSG00000185055 | EF-hand calcium-binding domain-containing |
| | | | | | protein 10 |
| 211 | HLA-A*11:01_ALAETSYVK | 162 | MAGA4 | ENSG00000147381 | Melanoma-associated antigen 4 (Cancer/testis |
| | | | | | antigen 1.4)(CT1.4)(MAGE-4 antigen)(MAGE- |
| | | | | | 41 antigen)(MAGE-X2 antigen) |
| 212 | HLA-A*30:02_AMIENFNAKY | 163 | NAA11 | ENSG00000156269 | N-alpha-acetyltransferase 11 (EC 2.3.1.255)(N- |
| | | | | | terminal acetyltransferase complex ARD1 subunit |
| | | | | | homolog B)(hARD2)(NatA catalytic subunit |
| | | | | | Naa11) |
| 213 | HLA-B*18:01_DEDGKIVGY | 164 | NAA11 | ENSG00000156269 | N-alpha-acetyltransferase 11 (EC 2.3.1.255)(N- |
| | | | | | terminal acetyltransferase complex ARD1 subunit |
| | | | | | homolog B)(hARD2)(NatA catalytic subunit |
| | | | | | Naa11) |
| 214 | HLA-A*26:01_DVPHGHITSL | 165 | NAA11 | ENSG00000156269 | N-alpha-acetyltransferase 11 (EC 2.3.1.255)(N- |
| | | | | | terminal acetyltransferase complex ARD1 subunit |
| | | | | | homolog B)(hARD2)(NatA catalytic subunit |
| | | | | | Naa11) |
| 215 | HLA-B*35:01_LPENYQMKY | 166 | NAA11 | ENSG00000156269 | N-alpha-acetyltransferase 11 (EC 2.3.1.255)(N- |
| | | | | | temiinal acetyltransferase complex ARD1 subunit |
| | | | | | homolog B)(hARD2)(NatA catalytic subunit |
| | | | | | Naa11) |
| 216 | HLA-A*02:07_ALLEEEEGV | 11 | MAGA4 | ENSG00000147381 | Melanoma-associated antigen 4 (Cancer/testis |
| | | | | | antigen 1.4)(CT1.4)(MAGE-4 antigen)(MAGE- |
| | | | | | 41 antigen)(MAGE-X2 antigen) |
| 217 | HLA-B*51:01_DAVVIALV | 167 | S6A18 | ENSG00000164363 | Sodium-dependent neutral amino acid transporter |
| | | | | | B(0)AT3 (Sodium-and chloride-dependent |
| | | | | | transporter XTRP2)(Solute carrier family 6 |
| | | | | | member 18)(System B(0) neutral amino acid |
| | | | | | transporter AT3) |
| 218 | HLA-A*26:01_EVVGVVYVY | 168 | 56A18 | ENSG00000164363 | Sodium-dependent neutral amino acid transporter |
| | | | | | B(0)AT3 (Sodium-and chloride-dependent |
| | | | | | transporter XTRP2)(Solute carrier family 6 |
| | | | | | member 18)(System B(0) neutral amino acid |
| | | | | | transporter AT3) |
| 219 | HLA-B*35:01_EVVGVVYVY | 168 | S6A18 | ENSG00000164363 | Sodium-dependent neutral amino acid transporter |
| | | | | | B(0)AT3 (Sodium-and chloride-dependent |
| | | | | | transporter XTRP2)(Solute carrier family 6 |
| | | | | | member 18)(System B(0) neutral amino acid |
| | | | | | transporter AT3) |
| 220 | HLA-B*51:01_FPYLVLTI | 169 | S6A18 | ENSG00000164363 | Sodium-dependent neutral amino acid transporter |
| | | | | | B(0)AT3 (Sodium-and chloride-dependent |
| | | | | | transporter XTRP2)(Solute carrier family 6 |
| | | | | | member 18)(System B(0) neutral amino acid |
| | | | | | transporter AT3) |
| 221 | HLA-A*29:02_ILLFWKPLRY | 170 | S6A18 | ENSG00000164363 | Sodium-dependent neutral amino acid transporter |
| | | | | | B(0)AT3 (Sodium-and chloride-dependent |
| | | | | | transporter XTRP2)(Solute carrier family 6 |
| | | | | | member 18)(System B(0) neutral amino acid |
| | | | | | transporter AT3) |
| 222 | HLA-B*18:01_LEVVGVVY | 171 | S6A18 | ENSG00000164363 | Sodium-dependent neutral amino acid transporter |
| | | | | | B(0)AT3 (Sodium-and chloride-dependent |
| | | | | | transporter XTRP2)(Solute carrier family 6 |
| | | | | | member 18)(System B(0) neutral amino acid |
| | | | | | transporter AT3) |
| 223 | HLA-A*29:02_LLFWKPLRY | 172 | S6A18 | ENSG00000164363 | Sodium-dependent neutral amino acid transporter |
| | | | | | B(0)AT3 (Sodium-and chloride-dependent |
| | | | | | transporter XTRP2)(Solute carrier family 6 |
| | | | | | member 18)(System B(0) neutral amino acid |
| | | | | | transporter AT3) |
| 224 | HLA-B*51:01_LPQTPLVI | 173 | NPBW1 | ENSG00000183729 | Neuropeptides B/W receptor type 1 (G-protein |
| | | | | | coupled receptor 7) |
| 225 | HLA-B*46:01_VAIDQYNTF | 174 | NPBW1 | ENSG00000183729 | Neuropeptides B/W receptor type 1 (G-protein |
| | | | | | coupled receptor 7) |
| 226 | HLA-A*01:01_ITDPTDPVDY | 175 | DCC | ENSG00000187323 | Netrin receptor DCC (Colorectal cancer |
| | | | | | suppressor)(Immunoglobulin superfamily DCC |
| | | | | | subclass member 1)(Tumor suppressor protein |
| | | | | | DCC) |
| 227 | HLA-A*02:07_LLPASSFSV | 176 | DCC | ENSG00000187323 | Netrin receptor DCC (Colorectal cancer |
| | | | | | suppressor)(Immunoglobulin superfamily DCC |
| | | | | | subclass member 1)(Tumor suppressor protein |
| | | | | | DCC) |
| 228 | HLA-A*02:01_SIWEGLVTV | 177 | DCC | ENSG00000187323 | Netrin receptor DCC (Colorectal cancer |
| | | | | | suppressor)(Immunoglobulin superfamily DCC |
| | | | | | subclass member 1)(Tumor suppressor protein |
| | | | | | DCC) |
| 229 | HLA-A*30:02_IVNPPPPEY | 178 | BRDT | ENSG00000137948 | Brodomain testis-specific protein |
| | | | | | (Cancer/testis antigen 9)(CT9)(RING3-like |
| | | | | | protein) |
| 230 | HLA-A*02:01_FLAPLSFYL | 179 | ACHA9 | ENSG00000174343 | Neuronal acetylcholine receptor subunit alpha-9 |
| | | | | | (Nicotinic acetylcholine receptor subunit alpha-9) |
| | | | | | (NACHR alpha-9) |
| 231 | HLA-A*29:02_VNTNVVLRY | 180 | ACHA9 | ENSG00000174343 | Neuronal acetylcholine receptor subunit alpha-9 |
| | | | | | (Nicotinic acetylcholine receptor subunit alpha-9) |
| | | | | | (NACHR alpha-9) |
| 232 | HLA-B*18:01_NEFAVGTKNY | 148 | SAGE1 | ENSG00000181433 | Sarcoma antigen 1 (Cancer/testis antigen 14) |
| | | | | | (CT14) |
| 233 | HLA-A*11:01_ASVEASKLK | 181 | V9GZ46 | ENSG00000124092 | Transcriptional repressor CTCFL |
| 234 | HLA-A*26:01_EVISVQMSM | 182 | UROL1 | ENSG00000177398 | Uromodulin-like 1 (Olfactorin) |
| 235 | HLA-B*35:01_TATLLIVRY | 183 | UROL1 | ENSG00000177398 | Uromodulin-like 1 (Olfactorin) |
| 236 | HLA-B*44:02_TEDPTGHFLW | 184 | UROL1 | ENSG00000177398 | Uromodulin-like 1 (Olfactorin) |
| 237 | HLA-B*44:03_TEDPTGHFLW | 184 | UROL1 | ENSG00000177398 | Uromodulin-like 1 (Olfactorin) |
| 238 | HLA-B*08:01_TIKTKYVL | 185 | UROL1 | ENSG00000177398 | Uromodulin-like 1 (Olfactorin) |
| 239 | HLA-B*18:01_YEVISVQM | 186 | UROL1 | ENSG00000177398 | Uromodulin-like 1 (Olfactorin) |
| 240 | HLA-A*02:07_ALDPPVDVFV | 187 | LN28A | ENSG00000131914 | Protein lin-28 homolog A (Lin-28A)(Zinc finger |
| | | | | | CCHC domain-containing protein 1) |
| 241 | HLA-B*35:01_HAGEDVAVF | 188 | PPBN | ENSG00000163286 | Alkaline phosphatase, placental-like (EC 3.1.3.1) |
| | | | | | (ALP-1)(Alkaline phosphatase Nagao isozyme) |
| | | | | | (Germ cell alkaline phosphatase)(GCAP) |
| | | | | | (Placental alkaline phosphatase-like)(PLAP-like) |
| 242 | HLA-C*02:02_AETSYVKVL | 10 | MAGA4 | ENSG00000147381 | Melanoma-associated antigen 4 (Cancer/testis |
| | | | | | antigen 1.4)(CT1.4)(MAGE-4 antigen)(MAGE- |
| | | | | | 41 antigen)(MAGE-X2 antigen) |
| 243 | HLA-A*29:02_AFGDILHRY | 189 | TRI51 | ENSG00000124900 | Tripartite motif-containing protein 51 (SPRY |
| | | | | | domain-containing protein 5) |
| 244 | HLA-A*26:01_ENVPLIGKY | 190 | ACHA9 | ENSG00000174343 | Neuronal acetylcholine receptor subunit alpha-9 |
| | | | | | (Nicotinic acetylcholine receptor subunit alpha-9) |
| | | | | | (NACHR alpha-9) |
| 245 | HLA-A*11:01_SSIFGLAPGK | 191 | PPBN | ENSG00000163286 | Alkaline phosphatase, placental-like (EC 3.1.3.1) |
| | | | | | (ALP-1)(Alkaline phosphatase Nagao isozyme) |
| | | | | | (Germ cell alkaline phosphatase)(GCAP) |
| | | | | | (Placental alkaline phosphatase-like)(PLAP-like) |
| 246 | HLA-B*51:01_LPTDLFNSV | 192 | ROP1A | ENSG00000065371 | Ropporin-1A (Cancer/testis antigen 91)(CT91) |
| | | | | | (Rhophilin-associated protein 1A) |
| 247 | HLA-A*33:01_DTFSYPIER | 193 | ACTL8 | ENSG00000117148 | Actin-like protein 8 (Cancer/testis antigen 57) |
| | | | | | (CT57) |
| 248 | HLA-A*26:01_EVPSGVIPNL | 194 | MAGC2 | ENSG00000046774 | Melanoma-associated antigen C2 (Cancer/testis |
| | | | | | antigen 10)(CT10)(Hepatocellular carcinoma- |
| | | | | | associated antigen 587)(MAGE-C2 antigen) |
| | | | | | (MAGE-E1 antigen) |
| 249 | HLA-A*24:02_LYATVIHDI | 195 | SAGE1 | ENSG00000181433 | Sarcoma antigen 1 (Cancer/testis antigen 14) |
| | | | | | (CT14) |
| 250 | HLA-B*35:01_FVQENYLEY | 2 | MAGA3 | ENSG00000221867 | Melanoma-associated antigen 3 (Antigen MZ2- |
| | | | | | D)(Cancer/testis antigen 1.3)(CT1.3)(MAGE-3 |
| | | | | | antigen) |
| 251 | HLA-A*11:01_SSYNRGLISK | 196 | NPSR1 | ENSG00000187258 | Neuropeptide S receptor (G-protein coupled |
| | | | | | receptor 154)(G-protein coupled receptor |
| | | | | | PGR14)(G-protein coupled receptor for asthma |
| | | | | | susceptibility) |
| 252 | HLA-A*02:07_ALDESNTYQL | 197 | ACTL8 | ENSG00000117148 | Actin-like protein 8 (Cancer/testis antigen 57) |
| | | | | | (CT57) |
| 253 | HLA-B*44:02_AEQRDDILYF | 198 | CRLF2 | ENSG00000205755 | Cytokine receptor-like factor 2 (Cytokine |
| | | | | | receptor-like 2)(IL-XR)(Thymic stromal |
| | | | | | lymphopoietin protein receptor)(TSLP receptor) |
| 254 | HLA-B*44:03_AEQRDDILYF | 198 | CRLF2 | ENSG00000205755 | Cytokine receptor-like factor 2 (Cytokine |
| | | | | | receptor-like 2)(IL-XR)(Thymic stromal |
| | | | | | lymphopoietin protein receptor)(TSLP receptor) |
| 255 | HLA-A*02:01_FLWGPRALAET | 199 | MAGA4 | ENSG00000147381 | Melanoma-associated antigen 4 (Cancer/testis |
| | | | | | antigen 1.4)(CT1.4)(MAGE-4 antigen)(MAGE- |
| | | | | | 41 antigen)(MAGE-X2 antigen) |
| 256 | HLA-A*11:01_IVQEPTEEK | 200 | X6RD31 | ENSG00000234068 | P antigen family member 2 (Fragment) |
| 257 | HLA-B*44:03_EESVLVGYVDY | 201 | TDRD1 | ENSG00000095627 | Tudor domain-containing protein 1 (Cancer/testis |
| | | | | | antigen 41.1)(CT41.1) |
| 258 | HLA-B*08:01_EVKARTQEL | 202 | BRDT | ENSG00000137948 | Brodomain testis-specific protein |
| | | | | | (Cancer/testis antigen 9)(CT9)(RING3-like |
| | | | | | protein) |
| 259 | HLA-A*11:01_SSDSESEMFPK | 203 | BRDT | ENSG00000137948 | Brodomain testis-specific protein |
| | | | | | (Cancer/testis antigen 9)(CT9)(RING3-like |
| | | | | | protein) |
| 260 | HLA-B*35:01_DANFIPTVY | 204 | V9GZ46 | ENSG00000124092 | Transcriptional repressor CTCFL |
| 261 | HLA-B*44:03_QESDLRLFL | 205 | NALP7 | ENSG00000167634 | NACHT, LRR and PYD domains-containing |
| | | | | | protein 7 (Nucleotide-binding oligomerization |
| | | | | | domain protein 12)(PYRIN-containing APAF1- |
| | | | | | like protein 3) |
| 262 | HLA-A*01:01_YSEKISYVY | 206 | SSX1 | ENSG00000126752 | Protein SSX1 (Cancer/testis antigen 5.1)(CT5.1) |
| | | | | | (Synovial sarcoma, X breakpoint 1) |
| 263 | HLA-A*03:01_RVHPVSTMVK | 207 | LDHC | ENSG00000166796 | L-lactate dehydrogenase C chain (LDH-C)(EC |
| | | | | | 1.1.1.27)(Cancer/testis antigen 32)(CT32)(LDH |
| | | | | | testis subunit)(LDH-X) |
| 264 | HLA-B*44:03_AEDEDGKIVGY | 208 | NAA11 | ENSG00000156269 | N-alpha-acetyltransferase 11 (EC 2.3.1.255)(N- |
| | | | | | terminal acetyltransferase complex ARD1 subunit |
| | | | | | homolog B)(hARD2)(NatA catalytic subunit |
| | | | | | Naa11) |
| 265 | HLA-B*44:03_EEPLSVTAKY | 209 | VCX1 | ENSG00000182583 | Variable charge X-linked protein 1 (Variable |
| | | | | | charge protein on X with ten repeats)(VCX-10r) |
| | | | | | (Variably charged protein X-B1)(VCX-B1) |
| 266 | HLA-A*29:02_AFLEVVGVVY | 210 | S6A18 | ENSG00000164363 | Sodium-dependent neutral amino acid transporter |
| | | | | | B(0)AT3 (Sodium-and chloride-dependent |
| | | | | | transporter XTRP2)(Solute carrier family 6 |
| | | | | | member 18)(System B(0) neutral amino acid |
| | | | | | transporter AT3) |
| 267 | HLA-A*29:02_ILTDINWRF | 211 | NPSR1 | ENSG00000187258 | Neuropeptide S receptor (G-protein coupled |
| | | | | | receptor 154)(G-protein coupled receptor |
| | | | | | PGR14)(G-protein coupled receptor for asthma |
| | | | | | susceptibility) |
| 268 | HLA-B*18:01_SEDPILTAF | 212 | TRPC5 | ENSG00000072315 | Short transient receptor potential channel 5 |
| | | | | | (TrpC5)(Transient receptor protein 5)(TRP-5) |
| | | | | | (hTRP-5)(hTRP5) |
| 269 | HLA-B*44:03_SEDPILTAF | 212 | TRPC5 | ENSG00000072315 | Short transient receptor potential channel 5 |
| | | | | | (TrpC5)(Transient receptor protein 5)(TRP-5) |
| | | | | | (hTRP-5)(hTRP5) |
| 270 | HLA-B*44:03_EETPFSRLI | 213 | INSL6 | ENSG00000120210 | Insulin-like peptide INSL6 (Insulin-like peptide |
| | | | | | 6)(Relaxin/insulin-like factor 1)[Cleaved into: |
| | | | | | Insulin-like peptide INSL6 B chain; Insulin-like |
| | | | | | peptide INSL6 A chain] |
| 271 | HLA-A*24:02_VYIHENAKF | 214 | INSL6 | ENSG00000120210 | Insulin-like peptide INSL6 (Insulin-like peptide |
| | | | | | 6)(Relaxin/insulin-like factor 1)[Cleaved into: |
| | | | | | Insulin-like peptide INSL6 B chain; Insulin-like |
| | | | | | peptide INSL6 A chain] |
| 272 | HLA-C*01:02_ITPQRQSAL | 215 | TDRD1 | ENSG00000095627 | Tudor domain-containing protein 1 (Cancer/testis |
| | | | | | antigen 41.1)(CT41.1) |
| 273 | HLA-B*51:01_EPYPVTKNI | 216 | CNTP5 | ENSG00000155052 | Contactin-associated protein-like 5 (Cell |
| | | | | | recognition molecule Caspr5) |
| 274 | HLA-B*35:01_IAAAFAVDY | 217 | X6RE50 | ENSG00000004809 | Solute carrier family 22 member 16 (Fragment) |
| 275 | HLA-B*35:01_MPLEVYEM | 218 | NMUR2 | ENSG00000132911 | Neuromeclin-U receptor 2 (NMU-R2)(G-protein |
| | | | | | coupled receptor FM-4)(G-protein coupled |
| | | | | | receptor TGR-1) |
| 276 | HLA-B*44:03_AEATQSMNAKY | 219 | TRIMM | ENSG00000179046 | Probable E3 ubiquitin-protein ligase TRIML2 |
| | | | | | (EC 2.3.2.27)(RING-type E3 ubiquitin |
| | | | | | transferase TRIML2)(SPRY domain-containing |
| | | | | | protein 6)(Tripartite motif family-like protein 2) |
| 277 | HLA-C*02:02_AEATQSMNAKY | 219 | TRIMM | ENSG00000179046 | Probable E3 ubiquitin-protein ligase TRIML2 |
| | | | | | (EC 2.3.2.27)(RING-type E3 ubiquitin |
| | | | | | transferase TRIML2)(SPRY domain-containing |
| | | | | | protein 6)(Tripartite motif family-like protein 2) |
| 278 | HLA-A*30:02_ATQSMNAKY | 220 | TRIMM | ENSG00000179046 | Probable E3 ubiquitin-protein ligase TRIML2 |
| | | | | | (EC 2.3.2.27)(RING-type E3 ubiquitin |
| | | | | | transferase TRIML2)(SPRY domain-containing |
| | | | | | protein 6)(Tripartite motif family-like protein 2) |
| 279 | HLA-A*02:07_KLDTVGVFL | 221 | TRIMM | ENSG00000179046 | Probable E3 ubiquitin-protein ligase TRIML2 |
| | | | | | (EC 2.3.2.27)(RING-type E3 ubiquitin |
| | | | | | transferase TRIML2)(SPRY domain-containing |
| | | | | | protein 6)(Tripartite motif family-like protein 2) |
| 280 | HLA-B*44:03_EEIENLYRF | 222 | MEIG1 | ENSG00000197889 | Meiosis expressed gene 1 protein homolog |
| 281 | HLA-A*29:02_VLLDEGAMLLY | 223 | NALP7 | ENSG00000167634 | NACHT, LRR and PYD domains-containing |
| | | | | | protein 7 (Nucleotide-binding oligomerization |
| | | | | | domain protein 12)(PYRIN-containing APAF1- |
| | | | | | like protein 3) |
| 282 | HLA-B*44:03_EEFQVLVKKI | 224 | S100G | ENSG00000169906 | Protein S100-G (Calbindin-D9k)(S100 calcium- |
| | | | | | binding protein G)(Vitamin D-dependent |
| | | | | | calcium-binding protein, intestinal)(CABP) |
| 283 | HLA-A*02:07_TLDDLFQEL | 225 | S100G | ENSG00000169906 | Protein S100-G (Calbindin-D9k)(S100 calcium- |
| | | | | | binding protein G)(Vitamin D-dependent |
| | | | | | calcium-binding protein, intestinal)(CABP) |
| 284 | HLA-C*04:01_TYDGMLSDV | 226 | MAGAA | ENSG00000124260 | Melanoma-associated antigen 10 (Cancer/testis |
| | | | | | antigen 1.10)(CT1.10)(MAGE-10 antigen) |
| 285 | HLA-B*18:01_TEFVGATM | 227 | TRPC5 | ENSG00000072315 | Short transient receptor potential channels |
| | | | | | (TrpC5)(Transient receptor protein 5)(TRP-5) |
| | | | | | (hTRP-5)(hTRP5) |
| 286 | HLA-C*01:02_QSPQGASSL | 140 | MAGA6 | ENSG00000197172 | Melanoma-associated antigen 6 (Cancer/testis |
| | | | | | antigen 1.6)(CT1.6)(MAGE-6 antigen) |
| | | | | | (MAGE3B antigen) |
| 287 | HLA-B*51:01_IPFTPPTV | 228 | A0A1BOGTJ6 | ENSG00000268655 | HCG1796489 |
| 288 | HLA-A*11:01_TVADPLPQVAK | 229 | A0A1BOGTJ6 | ENSG00000268655 | HCG1796489 |
| 289 | HLA-A*02:01_TVADPLPQV | 230 | A0A1BOGTJ6 | ENSG00000268655 | HCG1796489 |
| 290 | HLA-A*29:02_GYLVVGFVY | 231 | X6RE50 | ENSG00000004809 | Solute carrier family 22 member 16 (Fragment) |
| 291 | HLA-A*30:02_GQNLSIHSGQY | 232 | CRSPL | ENSG00000101074 | Peptidase inhibitor R3HDML (Cysteine-rich |
| | | | | | secretory protein R3HDML) |
| 292 | HLA-A*30:02_SVYPPAANMEY | 233 | CRSPL | ENSG00000101074 | Peptidase inhibitor R3HDML (Cysteine-rich |
| | | | | | secretory protein R3HDML) |
| 293 | HLA-A*11:01_SSSSPISNK | 234 | DMRT1 | ENSG00000137090 | Double sex-and mab-3-related transcription factor |
| | | | | | 1 (DM domain expressed in testis protein 1) |
| 294 | HLA-A*29:02_FLSSLFPFRY | 235 | MAJIN | ENSG00000168070 | Membrane-anchored junction protein |
| 295 | HLA-B*18:01_QELEVGKEAY | 236 | MAJIN | ENSG00000168070 | Membrane-anchored junction protein |
| 296 | HLA-B*44:03_QELEVGKEAY | 236 | MAJIN | ENSG00000168070 | Membrane-anchored junction protein |
| 297 | HLA-C*02:02_QELEVGKEAY | 236 | MAJIN | ENSG00000168070 | Membrane-anchored junction protein |
| 298 | HLA-B*44:02_SEQPPASLGF | 237 | MAJIN | ENSG00000168070 | Membrane-anchored junction protein |
| 299 | HLA-B*44:03_SEQPPASLGF | 237 | MAJIN | ENSG00000168070 | Membrane-anchored junction protein |
| 300 | HLA-C*02:02_SEQPPASLGF | 237 | MAJIN | ENSG00000168070 | Membrane-anchored junction protein |
| 301 | HLA-B*44:03_GELREISGNQY | 238 | PDCL2 | ENSG00000163440 | Phosducin-like protein 2 |
| 302 | HLA-A*26:01_EVKKEYASM | 239 | STRA8 | ENSG00000146857 | Stimulated by retinoic acid gene 8 protein |
| | | | | | homolog |
| 303 | HLA-A*33:01_DYFPVILKR | 240 | MAGC2 | ENSG00000046774 | Melanoma-associated antigen C2 (Cancer/testis |
| | | | | | antigen 10)(CT10)(Hepatocellular carcinoma- |
| | | | | | associated antigen 587)(MAGE-C2 antigen) |
| | | | | | (MAGE-E1 antigen) |
| 304 | HLA-B*44:03_KEGEPVEFIF | 241 | LN28B | ENSG00000187772 | Protein lin-28 homolog B (Lin-28B) |
| 305 | HLA-A*11:01_TVAVTQMNK | 242 | ACTL8 | ENSG00000117148 | Actin-like protein 8 (Cancer/testis antigen 57) |
| | | | | | (CT57) |
| 306 | HLA-A*02:07_VLDEVDAAL | 243 | SMC1B | ENSG00000077935 | Structural maintenance of chromosomes protein |
| | | | | | 1B (SMC protein 1B)(SMC-1-beta)(SMC-1B) |
| 307 | HLA-A*26:01_DVRIEVGLY | 244 | UROL1 | ENSG00000177398 | Uromodulin-like 1 (Olfactorin) |
| 308 | HLA-B*35:01_HPFKPDATY | 245 | PO4F1 | ENSG00000152192 | POU domain, class 4, transcription factor 1 |
| | | | | | (Brain-specific homeobox/POU domain protein |
| | | | | | 3A)(Brain-3A)(Brn-3A)(Homeobox/POU |
| | | | | | domain protein RDC-1)(Oct-T1) |
| 309 | HLA-A*11:01_AVLSAGPIITR | 246 | ZPLD1 | ENSG00000170044 | Zona pellucida-like domain-containing protein 1 |
| | | | | | (ZP domain-containing protein 1) |
| 310 | HLA-A*26:01_DTPDPPTIISY | 247 | ZPLD1 | ENSG00000170044 | Zona pellucida-like domain-containing protein 1 |
| | | | | | (ZP domain-containing protein 1) |
| 311 | HLA-B*35:01_FPAERDISVY | 248 | ZPLD1 | ENSG00000170044 | Zona pellucida-like domain-containing protein 1 |
| | | | | | (ZP domain-containing protein 1) |
| 312 | HLA-A*26:01_STIPGVSAY | 249 | ZPLD1 | ENSG00000170044 | Zona pellucida-like domain-containing protein 1 |
| | | | | | (ZP domain-containing protein 1) |
| 313 | HLA-B*46:01_STIPGVSAY | 249 | ZPLD1 | ENSG00000170044 | Zona pellucida-like domain-containing protein 1 |
| | | | | | (ZP domain-containing protein 1) |
| 314 | HLA-A*30:02_AGMTIATSY | 250 | SYCY2 | ENSG00000244476 | Syncytin-2 (Endogenous retrovirus group FRD |
| | | | | | member 1)(Envelope polyprotein)(HERV-FRD) |
| | | | | | (HERV-FRD 6p24.1 provims ancestral Env |
| | | | | | polyprotein)[Cleaved into: Surface protein (SU); |
| | | | | | Transmembrane protein (TM)] |
| 315 | HLA-A*33:01_DSLAAVVLQNR | 251 | SYCY2 | ENSG00000244476 | Syncytin-2 (Endogenous retrovirus group FRD |
| | | | | | member 1)(Envelope polyprotein)(HERV-FRD) |
| | | | | | (HERV-FRD 6p24.1 provirus ancestral Env |
| | | | | | polyprotein)[Cleaved into: Surface protein (SU); |
| | | | | | Transmembrane protein (TM)] |
| 316 | HLA-A*03:01_GTGIAGITK | 252 | SYCY2 | ENSG00000244476 | Syncytin-2 (Endogenous retrovirus group FRD |
| | | | | | member 1)(Envelope polyprotein)(HERV-FRD) |
| | | | | | (HERV-FRD 6p24.1 provirus ancestral Env |
| | | | | | polyprotein)[Cleaved into: Surface protein (SU); |
| | | | | | Transmembrane protein (TM)] |
| 317 | HLA-A*11:01_GTGIAGITK | 252 | SYCY2 | ENSG00000244476 | Syncytin-2 (Endogenous retrovirus group FRD |
| | | | | | member 1)(Envelope polyprotein)(HERV-FRD) |
| | | | | | (HERV-FRD 6p24.1 provirus ancestral Env |
| | | | | | polyprotein)[Cleaved into: Surface protein (SU); |
| | | | | | Transmembrane protein (TM)] |
| 318 | HLA-A*11:01_GTGTGIAGITK | 253 | SYCY2 | ENSG00000244476 | Syncytin-2 (Endogenous retrovirus group FRD |
| | | | | | member 1)(Envelope polyprotein)(HERV-FRD) |
| | | | | | (HERV-FRD 6p24.1 provirus ancestral Env |
| | | | | | polyprotein)[Cleaved into: Surface protein (SU); |
| | | | | | Transmembrane protein (TM)] |
| 319 | HLA-B*18:01_IEAELHISY | 254 | SYCY2 | ENSG00000244476 | Syncytin-2 (Endogenous retrovirus group FRD |
| | | | | | member 1)(Envelope polyprotein)(HERV-FRD) |
| | | | | | (HERV-FRD 6p24.1 provirus ancestral Env |
| | | | | | polyprotein)[Cleaved into: Surface protein (SU); |
| | | | | | Transmembrane protein (TM)] |
| 320 | HLA-B*44:03_IEAELHISY | 254 | SYCY2 | ENSG00000244476 | Syncytin-2 (Endogenous retrovirus group FRD |
| | | | | | member 1)(Envelope polyprotein)(HERV-FRD) |
| | | | | | (HERV-FRD 6p24.1 provirus ancestral Env |
| | | | | | polyprotein)[Cleaved into: Surface protein (SU); |
| | | | | | Transmembrane protein (TM)] |
| 321 | HLA-B*51:01_LPLTGPLV | 255 | SYCY2 | ENSG00000244476 | Syncytin-2 (Endogenous retrovirus group FRD |
| | | | | | member 1)(Envelope polyprotein)(HERV-FRD) |
| | | | | | (HERV-FRD 6p24.1 provirus ancestral Env |
| | | | | | polyprotein)[Cleaved into: Surface protein (SU); |
| | | | | | Transmembrane protein (TM)] |
| 322 | HLA-A*01:01_TVDSNQQTY | 256 | SYCY2 | ENSG00000244476 | Syncytin-2 (Endogenous retrovirus group FRD |
| | | | | | member 1)(Envelope polyprotein)(HERV-FRD) |
| | | | | | (HERV-FRD 6p24.1 provirus ancestral Env |
| | | | | | polyprotein)[Cleaved into: Surface protein (SU); |
| | | | | | Transmembrane protein (TM)] |
| 323 | HLA-A*24:02_TYQTYTHNQF | 257 | SYCY2 | ENSG00000244476 | Syncytin-2 (Endogenous retrovirus group FRD |
| | | | | | member 1)(Envelope polyprotein)(HERV-FRD) |
| | | | | | (HERV-FRD 6p24.1 provirus ancestral Env |
| | | | | | polyprotein)[Cleaved into: Surface protein (SU); |
| | | | | | Transmembrane protein (TM)] |
| 324 | HLA-B*51:01_DPFFKQQAV | 258 | ADAM2 | ENSG00000104755 | Disintegrin and metalloproteinase domain- |
| | | | | | containing protein 2 (ADAM 2)(Cancer/testis |
| | | | | | antigen 15)(CT15)(Fertilin subunit beta)(PH- |
| | | | | | 30)(PH30)(PH30-beta) |
| 325 | HLA-B*44:03_GEANELLHTF | 259 | ADAM2 | ENSG00000104755 | Disintegrin and metalloproteinase domain- |
| | | | | | containing protein 2 (ADAM 2)(Cancer/testis |
| | | | | | antigen 15)(CT15)(Fertilin subunit beta)(PH- |
| | | | | | 30)(PH30)(PH30-beta) |
| 326 | HLA-C*04:01_NFDSLPVQI | 260 | ADAM2 | ENSG00000104755 | Disintegrin and metalloproteinase domain- |
| | | | | | containing protein 2 (ADAM 2)(Cancer/testis |
| | | | | | antigen 15)(CT15)(Fertilin subunit beta)(PH- |
| | | | | | 30)(PH30)(PH30-beta) |
| 327 | HLA-A*11:01_ATAQPSQVRQK | 261 | FHL17 | ENSG00000132446 | Ferritin heavy polypeptide-like 17 (Cancer/testis |
| | | | | | antigen 38)(CT38) |
| 328 | HLA-A*11:01_SVLSEQFTK | 262 | V9GZ46 | ENSG00000124092 | Transcriptional repressor CTCFL |
| 329 | HLA-A*33:01_DIQEPYYGR | 263 | I22R2 | ENSG00000164485 | Interleukin-22 receptor subunit alpha-2 (IL-22 |
| | | | | | receptor subunit alpha-2)(IL-22R-alpha-2)(IL- |
| | | | | | 22RA2)(Cytokine receptor class-II member 10) |
| | | | | | (Cytokine receptor family 2 member 10)(CRF2- |
| | | | | | 10)(Cytokine receptor family type 2, soluble 1) |
| | | | | | (CRF2-S1)(Interleukin-22-binding protein)(IL- |
| | | | | | 22BP)(IL22BP)(ZcytoR16) |
| 330 | HLA-A*01:01_TSDIQEPYY | 264 | I22R2 | ENSG00000164485 | Interleukin-22 receptor subunit alpha-2 (IL-22 |
| | | | | | receptor subunit alpha-2)(IL-22R-alpha-2)(IL- |
| | | | | | 22RA2)(Cytokine receptor class-II member 10) |
| | | | | | (Cytokine receptor family 2 member 10)(CRF2- |
| | | | | | 10)(Cytokine receptor family type 2, soluble 1) |
| | | | | | (CRF2-S1)(Interleukin-22-binding protein)(IL- |
| | | | | | 22BP)(IL22BP)(ZcytoR16) |
| 331 | HLA-A*02:07_FLPDAFVTM | 265 | TDT | ENSG00000107447 | DNA nucleotidylexotransferase (EC 2.7.7.31) |
| | | | | | (Terminal addition enzyme)(Terminal |
| | | | | | deoxynucleandyltransferase)(Terminal |
| | | | | | transferase) |
| 332 | HLA-A*29:02_IFAHLGLDY | 266 | TDT | ENSG00000107447 | DNA nucleotidylexotransferase (EC 2.7.7.31) |
| | | | | | (Terminal addition enzyme)(Terminal |
| | | | | | deoxynucleandyltransferuse)(Terminal |
| | | | | | transferase) |
| 333 | HLA-A*02:01_KLFTSVFGV | 267 | TDT | ENSG00000107447 | DNA nucleotidylexotransferase (EC 2.7.7.31) |
| | | | | | (Terminal addition enzyme)(Terminal |
| | | | | | deoxynucleandyltransferuse)(Terminal |
| | | | | | transferase) |
| 334 | HLA-C*04:01_YYDLVESTF | 268 | TDT | ENSG00000107447 | DNA nucleotidylexotransferase (EC 2.7.7.31) |
| | | | | | (Terminal addition enzyme)(Terminal |
| | | | | | deoxynucleandyltransferuse)(Terminal |
| | | | | | transferase) |
| 335 | HLA-B*08:01_YPVTKNISL | 269 | CNTP5 | ENSG00000155052 | Contactin-associated protein-like 5 (Cell |
| | | | | | recognition molecule Caspr5) |
| 336 | HLA-B*18:01_SEVSFLEY | 270 | PIWL1 | ENSG00000125207 | Piwi-like protein 1 (EC 3.1.26.-) |
| 337 | HLA-A*11:01_ITWDAPAITK | 271 | ACHA9 | ENSG00000174343 | Neuronal acetylcholine receptor subunit alpha-9 |
| | | | | | (Nicotinic acetylcholine receptor subunit alpha-9) |
| | | | | | (NACHR alpha-9) |
| 338 | HLA-B*44:03_TEVVEGKEW | 272 | NPSR1 | ENSG00000187258 | Neuropeptide S receptor (G-protein coupled |
| | | | | | receptor 154)(G-protein coupled receptor |
| | | | | | PGR14)(G-protein coupled receptor for asthma |
| | | | | | susceptibility) |
| 339 | HLA-C*02:02_VAIDQYNTF | 174 | NPBW1 | ENSG00000183729 | Neuropeptides B/W receptor type 1 (G-protein |
| | | | | | coupled receptor 7) |
| 340 | HLA-B*35:01_DAWGGNTAY | 273 | CRBA4 | ENSG00000196431 | Beta-crystallin A4 (Beta-A4 crystallin) |
| 341 | HLA-B*08:01_YPAERLTSF | 274 | CRBA4 | ENSG00000196431 | Beta-clystallin A4 (Beta-A4 crystallin) |
| 342 | HLA-B*44:03_EEVSNLVNY | 275 | SUN3 | ENSG00000164744 | SUN domain-containing protein 3 (Sad1/unc-84 |
| | | | | | domain-containing protein 1) |
| 343 | HLA-B*18:01_IEAGTSESY | 276 | SUN3 | ENSG00000164744 | SUN domain-containing protein 3 (Sad1/unc-84 |
| | | | | | domain-containing protein 1) |
| 344 | HLA-B*44:03_IEAGTSESY | 276 | SUN3 | ENSG00000164744 | SUN domain-containing protein 3 (Sad1/unc-84 |
| | | | | | domain-containing protein 1) |
| 345 | HLA-A*29:02_IFSNWGHPKY | 277 | SUN3 | ENSG00000164744 | SUN domain-containing protein 3 (Sad1/unc-84 |
| | | | | | domain-containing protein 1) |
| 346 | HLA-A*11:01_VTMEHISEK | 278 | SUN3 | ENSG00000164744 | SUN domain-containing protein 3 (Sad1/unc-84 |
| | | | | | domain-containing protein 1) |
| 347 | HLA-A*02:01_YLSEALQEA | 279 | NALP7 | ENSG00000167634 | NACHT, LRR and PYD domains-containing |
| | | | | | protein 7 (Nucleotide-binding oligomerization |
| | | | | | domain protein 12)(PYRIN-containing APAF1- |
| | | | | | like protein 3) |
| 348 | HLA-A*26:01_EVVGELVAKF | 280 | TFDP3 | ENSG00000183434 | Transcription factor Dp family member 3 |
| | | | | | (Cancer/testis antigen 30)(CT30)(Hepatocellular |
| | | | | | carcinoma-associated antigen 661) |
| 349 | HLA-A*02:01_GMMDDYTYV | 281 | NKAI3 | ENSG00000185942 | Sodium/potassium-transporting ATPase subunit |
| | | | | | beta-1-interacting protein 3 (Na(+)/K(+)- |
| | | | | | transporting ATPase subunit beta-1-interacting |
| | | | | | protein 3)(Protein FAM77D) |
| 350 | HLA-B*44:03_AEMAVGLVVF | 282 | COX8C | ENSG00000187581 | Cytochrome c oxidase subunit 8C, mitochondrial |
| | | | | | (Cytochrome c oxidase polypeptide 8 isoform 3) |
| | | | | | (Cytochrome c oxidase polypeptide VIII isoform |
| | | | | | 3)(COX VIII-3)(Cytochrome c oxidase subunit |
| | | | | | 8-3)(COX8-3)(Cytochrome c oxidase subunit |
| | | | | | VIIIC) |
| 351 | HLA-C*02:02_AEMAVGLVVF | 282 | COX8C | ENSG00000187581 | Cytochrome c oxidase subunit 8C, mitochondrial |
| | | | | | (Cytochrome c oxidase polypeptide 8 isoform 3) |
| | | | | | (Cytochrome c oxidase polypeptide VIII isoform |
| | | | | | 3)(COX VIII-3)(Cytochrome c oxidase subunit |
| | | | | | 8-3)(COX8-3)(Cytochrome c oxidase subunit |
| | | | | | VIIIC) |
| 352 | HLA-B*44:03_SENDIPSVAF | 283 | DC4L2 | ENSG00000176566 | DDB1-and CUL4-associated factor 4-like protein |
| | | | | | 2 (WD repeat-containing protein 21C) |
| 353 | HLA-A*33:01_NNFPHSIAR | 284 | KKLC1 | ENSG00000204019 | Kita-kyushu lung cancer antigen 1 (KK-LC-1) |
| | | | | | (Cancer/testis antigen 83) |
| 354 | HLA-A*31:01_RGNEVISVMNR | 285 | PPBN | ENSG00000163286 | Alkaline phosphatase, placental-like (EC 3.1.3.1) |
| | | | | | (ALP-1)(Alkaline phosphatase Nagao isozyme) |
| | | | | | (Germ cell alkaline phosphatase)(GCAP) |
| | | | | | (Placental alkaline phosphatase-like)(PLAP-like) |
| 355 | HLA-A*11:01_KTYETNLEIKK | 286 | NALP7 | ENSG00000167634 | NACHT, LRR and PYD domains-containing |
| | | | | | protein 7 (Nucleotide-binding oligomerization |
| | | | | | domain protein 12)(PYRIN-containing APAF1- |
| | | | | | like protein 3) |
| 356 | HLA-A*11:01_AALDNTNIGK | 287 | SMC1B | ENSG00000077935 | Structural maintenance of chromosomes protein |
| | | | | | 1B (SMC protein 1B)(SMC-1-beta)(SMC-1B) |
| 357 | HLA-A*29:02_ALASVGHLY | 288 | ONEC3 | ENSG00000205922 | One cut domain family member 3 (One cut |
| | | | | | homeobox 3)(Transcription factor ONECUT-3) |
| | | | | | (OC-3) |
| 358 | HLA-A*26:01_EVSNKIVGY | 289 | PERL | ENSG00000167419 | Lactoperoxidase (LPO)(EC 1.11.1.7)(Salivary |
| | | | | | peroxidase)(SPO) |
| 359 | HLA-A*29:02_SFLDASFVY | 290 | PERL | ENSG00000167419 | Lactoperoxidase (LPO)(EC 1.11.1.7)(Salivary |
| | | | | | peroxidase)(SPO) |
| 360 | HLA-A*11:01_TVSQAKVQVNK | 291 | PERL | ENSG00000167419 | Lactoperoxidase (LPO)(EC 1.11.1.7)(Salivary |
| | | | | | peroxidase)(SPO) |
| 361 | HLA-A*26:01_ELKQDISSF | 292 | TRPC5 | ENSG00000072315 | Short transient receptor potential channel 5 |
| | | | | | (TipC5)(Transient receptor protein 5)(TRP-5) |
| | | | | | (hTRP-5)(hTRP5) |
| 362 | HLA-B*18:01_VENEFKAEY | 293 | TRPC5 | ENSG00000072315 | Short transient receptor potential channel 5 |
| | | | | | (TipC5)(Transient receptor protein 5)(TRP-5) |
| | | | | | (hTRP-5)(hTRP5) |
| 363 | HLA-A*29:02_SFSNVWHLY | 294 | VRTN | ENSG00000133980 | Vertnin |
| 364 | HLA-A*03:01_ATAQPSQVRQK | 261 | FHL17 | ENSG00000132446 | Ferritin heavy polypeptide-like 17 (Cancer/testis |
| | | | | | antigen 38)(CT38) |
| 365 | HLA-B*51:01_DAAINSHI | 295 | FHL17 | ENSG00000132446 | Ferritin heavy polypeptide-like 17 (Cancer/testis |
| | | | | | antigen 38)(CT38) |
| 366 | HLA-A*29:02_VALENFFRY | 296 | FHL17 | ENSG00000132446 | Ferritin heavy polypeptide-like 17 (Cancer/testis |
| | | | | | antigen 38)(CT38) |
| 367 | HLA-B*44:03_AEMLTNVISRY | 297 | MAGC1 | ENSG00000155495 | Melanoma-associated antigen C1 (Cancer/testis |
| | | | | | antigen 7.1)(CT7.1)(MAGE-C1 antigen) |
| 368 | HLA-B*44:03_DEDGKIVGY | 164 | NAA11 | ENSG00000156269 | N-alpha-acetyltransferase 11 (EC 2.3.1.255)(N- |
| | | | | | terminal acetyltransferase complex ARD1 subunit |
| | | | | | homolog B)(hARD2)(NatA catalytic subunit |
| | | | | | Naa11) |
| 369 | HLA-A*11:01_KTLGKIAEK | 298 | SG1D1 | ENSG00000168515 | Secretoglobin family 1D member 1 (Lipophilin- |
| | | | | | A) |
| 370 | HLA-A*24:02_YYDLVESTF | 268 | TDT | ENSG00000107447 | DNA nucleotidylexotransferase (EC 2.7.7.31) |
| | | | | | (Terminal addition enzyme)(Terminal |
| | | | | | deoxynucleotidyltransfemse)(Terminal |
| | | | | | transferase) |
| 371 | HLA-A*30:02_AQAFTSGKY | 299 | TRI51 | ENSG00000124900 | Tripartite motif-containing protein 51 (SPRY |
| | | | | | domain-containing protein 5) |
| 372 | HLA-B*18:01_DEEDMQAVETY | 300 | PD L2 | ENSG00000163440 | Phosducin-like protein 2 |
| 373 | HLA-A*30:02_STKSVSTSY | 301 | sHT1F | ENSG00000179097 | 5-hydroxytryptamine receptor 1F (5-HT-1F)(5- |
| | | | | | HT1F)(Serotonin receptor 1F) |
| 374 | HLA-A*02:01_LVIDTVTEV | 302 | SPERT | ENSG00000174015 | Spermatid-associated protein (Protein chibby |
| | | | | | homolog 2) |
| 375 | HLA-C*05:01_VIDTVTEV | 303 | SPERT | ENSG00000174015 | Spermatid-associated protein (Protein chibby |
| | | | | | homolog 2) |
| 376 | HLA-B*51:01_YPLNRFSSV | 304 | SPERT | ENSG00000174015 | Spermatid-associated protein (Protein chibby |
| | | | | | homolog 2) |
| 377 | HLA-B*35:01_YPAERLTSF | 274 | CRBA4 | ENSG00000196431 | Beta-crystallin A4 (Beta-A4 crystallin) |
| 378 | HLA-B*18:01_TEIVLENNY | 305 | R4GMQ3 | ENSG00000107831 | Fibroblast growth factor 8 |
| 379 | HLA-A*01:01_YTALQNAKY | 306 | R4GMQ3 | ENSG00000107831 | Fibroblast growth factor 8 |
| 380 | HLA-A*33:01_DSFQKVILR | 307 | ZN728 | ENSG00000269067 | Zinc finger protein 728 |
| 381 | HLA-B*44:03_SEPQIVPITF | 308 | CNTP5 | ENSG00000155052 | Contactin-associated protein-like 5 (Cell |
| | | | | | recognition molecule Caspr5) |
| 382 | HLA-B*44:02_EEIIPLNRIY | 71 | TDRD1 | ENSG00000095627 | Tudor domain-containing protein 1 (Cancer/testis |
| | | | | | antigen 41.1)(CT41.1) |
| 383 | HLA-A*24:02_IYTGVTVSF | 309 | LMIP | ENSG00000105370 | Lens fiber membrane intrinsic protein (MP18) |
| | | | | | (MP19)(MP20) |
| 384 | HLA-A*29:02_SFAHQGLWRY | 310 | LMIP | ENSG00000105370 | Lens fiber membrane intrinsic protein (MP18) |
| | | | | | (MP19)(MP20) |
| 385 | HLA-B*44:03_EEIPQEIQRL | 311 | LRIQ4 | ENSG00000188306 | Leucine-rich repeat and IQ domain-containing |
| | | | | | protein 4 (Leucine-rich repeat-containing protein |
| | | | | | 64) |
| 386 | HLA-A*01:01_YIENNHLEY | 312 | LRIQ4 | ENSG00000188306 | Leucine-rich repeat and IQ domain-containing |
| | | | | | protein 4 (Leucine-rich repeat-containing protein |
| | | | | | 64) |
| 387 | HLA-A*01:01_HSEELDPQKY | 313 | TRPC5 | ENSG00000072315 | Short transient receptor potential channel 5 |
| | | | | | (TipC5)(Transient receptor protein 5)(TRP-5) |
| | | | | | (hTRP-5)(hTRP5) |
| 388 | HLA-B*44:02_AEMLESVIKNY | 24 | MAGA8 | ENSG00000156009 | Melanoma-associated antigen 8 (Cancer/testis |
| | | | | | antigen 1.8)(CT1.8)(MAGE-8 antigen) |
| 389 | HLA-B*44:03_AEMLESVIKNY | 24 | MAGA8 | ENSG00000156009 | Melanoma-associated antigen 8 (Cancer/testis |
| | | | | | antigen 1.8)(CT1.8)(MAGE-8 antigen) |
| 390 | HLA-C*02:02_AEMLESVIKNY | 24 | MAGA8 | ENSG00000156009 | Melanoma-associated antigen 8 (Cancer/testis |
| | | | | | antigen 1.8)(CT1.8)(MAGE-8 antigen) |
| 391 | HLA-B*44:03_AETSYVKVL | 10 | MAGA8 | ENSG00000156009 | Melanoma-associated antigen 8 (Cancer/testis |
| | | | | | antigen 1.8)(CT1.8)(MAGE-8 antigen) |
| 392 | HLA-A*02:01_ALDEKVAEL | 314 | MAGA8 | ENSG00000156009 | Melanoma-associated antigen 8 (Cancer/testis |
| | | | | | antigen 1.8)(CT1.8)(MAGE-8 antigen) |
| 393 | HLA-A*02:07_ALDEKVAEL | 314 | MAGA8 | ENSG00000156009 | Melanoma-associated antigen 8 (Cancer/testis |
| | | | | | antigen 1.8)(CT1.8)(MAGE-8 antigen) |
| 394 | HLA-A*02:01_GLYDGREHSV | 315 | MAGA8 | ENSG00000156009 | Melanoma-associated antigen 8 (Cancer/testis |
| | | | | | antigen 1.8)(CT1.8)(MAGE-8 antigen) |
| 395 | HLA-B*44:03_SESSTILVVRY | 316 | SPNXB | ENSG00000227234 | Sperm protein associated with the nucleus on the |
| | | | | | X chromosome B1 (Cancer/testis antigen 11.2) |
| | | | | | (CT11.2)(Nuclear-associated protein SPAN-Xb) |
| | | | | | (SPANX-B)(SPANX family member B1) |
| | | | | | (SPANX family member Fl) |
| 396 | HLA-A*01:01_QTEFPTTYY | 317 | GFY | ENSG00000261949 | Golgi-associated olfactory signaling regulator |
| | | | | | (Protein Goofy) |
| 397 | HLA-B*18:01_TEFPTTYY | 318 | GFY | ENSG00000261949 | Golgi-associated olfactory signaling regulator |
| | | | | | (Protein Goofy) |
| 398 | HLA-A*01:01_TSDPQISTSLY | 319 | GFY | ENSG00000261949 | Golgi-associated olfactory signaling regulator |
| | | | | | (Protein Goofy) |
| 399 | HLA-A*02:07_VLDEEVSNL | 320 | SUN3 | ENSG00000164744 | SUN domain-containing protein 3 (Sad1/unc-84 |
| | | | | | domain-containing protein 1) |
| 400 | HLA-B*46:01_FLITQATAY | 321 | NBPF4 | ENSG00000196427 | Neuroblastoma breakpoint family member 4 |
| 401 | HLA-A*30:02_ALQGALGLY | 322 | PPAT | ENSG00000142513 | Testicular acid phosphatase (EC 3.1.3.2) |
| 402 | HLA-B*51:01_YPMDPHKEV | 323 | PPAT | ENSG00000142513 | Testicular acid phosphatase (EC 3.1.3.2) |
| 403 | HLA-B*51:01_LAFLVGQSI | 324 | PIWL1 | ENSG00000125207 | Piwi-like protein 1 (EC 3.1.26.-) |
| 404 | HLA-B*35:01_MPSEVSEVL | 325 | E9PRF5 | ENSG00000233436 | BTB/POZ domain-containing protein 18 |
| | | | | | (Fragment) |
| 405 | HLA-A*02:07_KLFTSVFGV | 267 | TDT | ENSG00000107447 | DNA nucleotidylexotransferase (EC 2.7.7.31) |
| | | | | | (Terminal addition enzyme)(Terminal |
| | | | | | deoxynucleotidyltransfemse)(Terminal |
| | | | | | transferase) |
| 406 | HLA-B*35:01_TAAAFTISY | 326 | S22AD | ENSG00000172940 | Solute carrier family 22 member 13 (Organic |
| | | | | | cation transporter-lace 3)(ORCTL-3) |
| 407 | HLA-A*29:02_FFLHPISFY | 327 | MBOA4 | ENSG00000177669 | Ghrelin O-acyltransferase (EC 2.3.1.-) |
| | | | | | (Membrane-bound O-acyltransferase domain- |
| | | | | | containing protein 4)(O-acyltransferase domain- |
| | | | | | containing protein 4) |
| 408 | HLA-A*11:01_ASQISSETLIK | 328 | DPPA3 | ENSG00000187569 | Developmental pluripotency-associated protein 3 |
| | | | | | (Stella-related protein) |
| 409 | HLA-A*11:01_ASALFQSNK | 329 | RNS10 | ENSG00000182545 | Inactive ribonuclease-like protein 10 |
| 410 | HLA-B*18:01_SEESVLVGY | 330 | TDRD1 | ENSG00000095627 | Tudor domain-containing protein 1 (Cancer/testis |
| | | | | | antigen 41.1)(CT41.1) |
| 411 | HLA-A*26:01_ETSYVKVLEY | 331 | MAGA1 | ENSG00000198681 | Melanoma-associated antigen 1 (Antigen MZ2-E) |
| | | | | | (Cancer/testis antigen 1.1)(CT1.1)(MAGE-1 |
| | | | | | antigen) |
| 412 | HLA-B*18:01_DEGISSLF | 332 | KCNH5 | ENSG00000140015 | Potassium voltage-gated channel subfamily H |
| | | | | | member 5 (Ether-a-go-go potassium channel 2) |
| | | | | | (hEAG2)(Voltage-gated potassium channel |
| | | | | | subunit Kv10.2) |
| 413 | HLA-A*03:01_KVNSPIRMK | 333 | KCNH5 | ENSG00000140015 | Potassium voltage-gated channel subfamily H |
| | | | | | member 5 (Ether-a-go-go potassium channel 2) |
| | | | | | (hEAG2)(Voltage-gated potassium channel |
| | | | | | subunit Kv10.2) |
| 414 | HLA-B*35:01_LPYDIINAF | 334 | KCNH5 | ENSG00000140015 | Potassium voltage-gated channel subfamily H |
| | | | | | member 5 (Ether-a-go-go potassium channel 2) |
| | | | | | (hEAG2)(Voltage-gated potassium channel |
| | | | | | subunit Kv10.2) |
| 415 | HLA-C*05:01_NVDEGISSL | 335 | KCNH5 | ENSG00000140015 | Potassium voltage-gated channel subfamily H |
| | | | | | member 5 (Ether-a-go-go potassium channel 2) |
| | | | | | (hEAG2)(Voltage-gated potassium channel |
| | | | | | subunit Kv10.2) |
| 416 | HLA-A*11:01_SVLQQLTPMNK | 336 | KCNH5 | ENSG00000140015 | Potassium voltage-gated channel subfamily H |
| | | | | | member 5 (Ether-a-go-go potassium channel 2) |
| | | | | | (hEAG2)(Voltage-gated potassium channel |
| | | | | | subunit Kv10.2) |
| 417 | HLA-B*35:01_TPIQTSLAY | 337 | KCNH5 | ENSG00000140015 | Potassium voltage-gated channel subfamily H |
| | | | | | member 5 (Ether-a-go-go potassium channel 2) |
| | | | | | (hEAG2)(Voltage-gated potassium channel |
| | | | | | subunit Kv10.2) |
| 418 | HLA-B*35:01_EALTPHSSY | 338 | I22R2 | ENSG00000164485 | Interleukin-22 receptor subunit alpha-2 (IL-22 |
| | | | | | receptor subunit alpha-2)(IL-22R-alpha-2)(IL- |
| | | | | | 22RA2)(Cytokine receptor class-II member 10) |
| | | | | | (Cytokine receptor family 2 member 10)(CRF2- |
| | | | | | 10)(Cytokine receptor family type 2, soluble 1) |
| | | | | | (CRF2-S1)(Interleukin-22-binding protein)(IL- |
| | | | | | 22BP)(IL22BP)(ZcytoR16) |
| 419 | HLA-A*01:01_FTEIVLENNY | 339 | R4GMQ3 | ENSG00000107831 | Fibroblast growth factor 8 |
| 420 | HLA-B*44:03_AEVPIEPHW | 340 | GCNT7 | ENSG00000124091 | Beta-1,3-galactosyl-O-glycosyl-glycoprotein |
| | | | | | beta-1,6-N-acetylglucosaminyltransferase 7 (EC |
| | | | | | 2.4.1.-) |
| 421 | HLA-B*35:01_LPFTIISM | 341 | TDT | ENSG00000107447 | DNA nucleotidylexotransferase (EC 2.7.7.31) |
| | | | | | (Terminal addition enzyme)(Teiminal |
| | | | | | deoxynucleotidyltransferase)(Terminal |
| | | | | | transferase) |
| 422 | HLA-B*35:01_DPSQFNPTY | 342 | DPPA3 | ENSG00000187569 | Developmental pluripotency-associated protein 3 |
| | | | | | (Stella-related protein) |
| 423 | HLA-B*44:03_AEILKNEAY | 343 | A0A1BOGTN1 | ENSG00000224960 | Putative SMEK homolog 3 |
| 424 | HLA-C*02:02_AEILKNEAY | 343 | A0A1BOGTN1 | ENSG00000224960 | Putative SMEK homolog 3 |
| 425 | HLA-B*44:02_AENQGLVLKF | 344 | A0A1BOGTN1 | ENSG00000224960 | Putative SMEK homolog 3 |
| 426 | HLA-B*44:03_AENQGLVLKF | 344 | A0A1BOGTN1 | ENSG00000224960 | Putative SMEK homolog 3 |
| 427 | HLA-A*02:01_ALFETLIQL | 345 | A0A1BOGTN1 | ENSG00000224960 | Putative SMEK homolog 3 |
| 428 | HLA-A*26:01_ESIEYVQTF | 346 | A0A1BOGTN1 | ENSG00000224960 | Putative SMEK homolog 3 |
| 429 | HLA-A*26:01_EVIPITNSEL | 347 | A0A1BOGTN1 | ENSG00000224960 | Putative SMEK homolog 3 |
| 430 | HLA-B*51:01_LPALKIVMI | 348 | A0A1BOGTN1 | ENSG00000224960 | Putative SMEK homolog 3 |
| 431 | HLA-B*18:01_NEMSVISNM | 349 | A0A1BOGTN1 | ENSG00000224960 | Putative SMEK homolog 3 |
| 432 | HLA-A*01:01_NTEGLHHLY | 350 | A0A1BOGTN1 | ENSG00000224960 | Putative SMEK homolog 3 |
| 433 | HLA-A*24:02_NYIIKGNLF | 351 | A0A1BOGTN1 | ENSG00000224960 | Putative SMEK homolog 3 |
| 434 | HLA-A*02:01_QIADIVTSV | 352 | A0A1BOGTN1 | ENSG00000224960 | Putative SMEK homolog 3 |
| 435 | HLA-C*01:02_VIPITNSEL | 353 | A0A1B0GTN1 | ENSG00000224960 | Putative SMEK homolog 3 |
| 436 | HLA-B*18:01_SENDIPSVAF | 283 | DC4L2 | ENSG00000176566 | DDB1-and CUL4-associated factor 4-like protein |
| | | | | | 2 (WD repeat-containing protein 21C) |
| 437 | HLA-C*01:02_AAPAGPGEL | 354 | FOXI3 | ENSG00000214336 | Forkhead box protein I3 |
| 438 | HLA-C*02:02_AESSSKRSF | 355 | TRPC5 | ENSG00000072315 | Short transient receptor potential channel 5 |
| | | | | | (TipC5)(Transient receptor protein 5)(TRP-5) |
| | | | | | (hTRP-5)(hTRP5) |
| 439 | HLA-B*18:01_TEFVGATMF | 356 | TRPC5 | ENSG00000072315 | Short transient receptor potential channel 5 |
| | | | | | (TipC5)(Transient receptor protein 5)(TRP-5) |
| | | | | | (hTRP-5)(hTRP5) |
| 440 | HLA-A*29:02_VYVGDALLY | 357 | TRPC5 | ENSG00000072315 | Short transient receptor potential channel 5 |
| | | | | | (TrpC5)(Transient receptor protein 5)(TRP-5) |
| | | | | | (hTRP-5)(hTRP5) |
| 441 | HLA-B*51:01_HPLNGQPLI | 358 | LUZP4 | ENSG00000102021 | Leucine zipper protein 4 (Cancer/testis antigen |
| | | | | | 28)(CT-28)(CT28)(Tumor antigen HOM-TES- |
| | | | | | 85) |
| 442 | HLA-A*02:07_LLDGFMITL | 359 | PASD1 | ENSG00000166049 | Circadian clock protein PASD1 (Cancer/testis |
| | | | | | antigen 63)(CT63)(OX-TES-1)(PAS domain- |
| | | | | | containing protein 1) |
| 443 | HLA-A*24:02_VYQKIILKF | 360 | PASD1 | ENSG00000166049 | Circadian clock protein PASD1 (Cancer/testis |
| | | | | | antigen 63)(CT63)(OX-TES-1)(PAS domain- |
| | | | | | containing protein 1) |
| 444 | HLA-B*35:01_EPLSVTASY | 361 | VCX3 | ENSG00000169059 | Variable charge X-linked protein 3 (Variable |
| | | | | | charge protein on X with eight repeats)(VCX-8r) |
| | | | | | (Variably charged protein X-A)(VCX-A) |
| 445 | HLA-B*51:01_DAFVPFSI | 362 | CP2AD | ENSG00000197838 | Cytochrome P450 2A13 (EC 1.14.14.1) |
| | | | | | (CYPIIA13) |
| 446 | HLA-A*26:01_ETVSTTLRY | 363 | CP2AD | ENSG00000197838 | Cytochrome P450 2A13 (EC 1.14.14.1) |
| | | | | | (CYPIIA13) |
| 447 | HLA-A*01:01_GTETVSTTLRY | 364 | CP2AD | ENSG00000197838 | Cytochrome P450 2A13 (EC 1.14.14.1) |
| | | | | | (CYPIIA13) |
| 448 | HLA-A*02:01_FLWGPRALVET | 41 | MAGAC | ENSG00000213401 | Melanoma-associated antigen 12 (Cancer/testis |
| | | | | | antigen 1.12)(CT1.12)(MAGE-12 antigen) |
| | | | | | (MAGE12F antigen) |
| 449 | HLA-A*11:01_AVNPELAPVMK | 365 | SPT22 | ENSG00000141255 | Spermatogenesis-associated protein 22 (Testis |
| | | | | | development protein NYD-SP20) |
| 450 | HLA-C*16:01_SAVTPGPYY | 366 | SPT22 | ENSG00000141255 | Spermatogenesis-associated protein 22 (Testis |
| | | | | | development protein NYD-SP20) |
| 451 | HLA-A*31:01_RVQVWFQNR | 367 | ALX3 | ENSG00000156150 | Homeobox protein aristaless-like 3 (Proline-rich |
| | | | | | transcription factor ALX3) |
| 452 | HLA-A*02:07_KMAELVHFL | 368 | MAGAC | ENSG00000213401 | Melanoma-associated antigen 12 (Cancer/testis |
| | | | | | antigen 1.12)(CT1.12)(MAGE-12 antigen) |
| | | | | | (MAGE12F antigen) |
| 453 | HLA-A*29:02_IFINKEDSLLY | 369 | C295L | ENSG00000178404 | CEP295 N-terminal-like protein (KIAA1731 N- |
| | | | | | terminal like protein) |
| 454 | HLA-A*02:01_GLWEIENNPTV | 370 | HDGL1 | ENSG00000112273 | Hepatoma-derived growth factor-like protein 1 |
| | | | | | (PWWP domain-containing protein 1) |
| 455 | HLA-A*03:01_SAYGMPMYK | 371 | HDGL1 | ENSG00000112273 | Hepatoma-derived growth factor-like protein 1 |
| | | | | | (PWWP domain-containing protein 1) |
| 456 | HLA-A*11:01_SAYGMPMYK | 371 | HDGL1 | ENSG00000112273 | Hepatoma-derived growth factor-like protein 1 |
| | | | | | (PWWP domain-containing protein 1) |
| 457 | HLA-B*35:01_AAAAAAATY | 372 | NKX24 | ENSG00000125816 | Homeobox protein Nkx-2.4 (Homeobox protein |
| | | | | | NK-2 homolog D) |
| 458 | HLA-A*03:01_RVAVPVLVK | 373 | NKX24 | ENSG00000125816 | Homeobox protein Nkx-2.4 (Homeobox protein |
| | | | | | NK-2 homolog D) |
| 459 | HLA-A*30:02_SQFPHGAMGSY | 374 | NKX24 | ENSG00000125816 | Homeobox protein Nkx-2.4 (Homeobox protein |
| | | | | | NK-2 homolog D) |
| 460 | HLA-B*51:01_DAVAAMSV | 375 | RBM46 | ENSG00000151962 | Probable RNA-binding protein 46 (Cancer/testis |
| | | | | | antigen 68)(CT68)(RNA-binding motif protein |
| | | | | | 46) |
| 461 | HLA-A*29:02_NWAPPEYYLY | 376 | RBM46 | ENSG00000151962 | Probable RNA-binding protein 46 (Cancer/testis |
| | | | | | antigen 68)(CT68)(RNA-binding motif protein |
| | | | | | 46) |
| 462 | HLA-B*18:01_TEETIKAEF | 377 | RBM46 | ENSG00000151962 | Probable RNA-binding protein 46 (Cancer/testis |
| | | | | | antigen 68)(CT68)(RNA-binding motif protein |
| | | | | | 46) |
| 463 | HLA-A*29:02_WAPPEYYLY | 378 | RBM46 | ENSG00000151962 | Probable RNA-binding protein 46 (Cancer/testis |
| | | | | | antigen 68)(CT68)(RNA-binding motif protein |
| | | | | | 46) |
| 464 | HLA-C*02:02_KEVDPTGHSF | 379 | MAGAA | ENSG00000124260 | Melanoma-associated antigen 10 (Cancer/testis |
| | | | | | antigen 1.10)(CT1.10)(MAGE-10 antigen) |
| 465 | HLA-B*18:01_DEEQNLVAF | 380 | PRDM7 | ENSG00000126856 | Probable histone-lysine N-methyltransferase |
| | | | | | PRDM7 (EC 2.1.1.43)(PR domain zinc finger |
| | | | | | protein 7)(PR domain-containing protein 7) |
| 466 | HLA-B*44:03_EEAANSGYSW | 381 | PRDM7 | ENSG00000126856 | Probable histone-lysine N-methyltransferase |
| | | | | | PRDM7 (EC 2.1.1.43)(PR domain zinc finger |
| | | | | | protein 7)(PR domain-containing protein 7) |
| 467 | HLA-C*02:02_EEAANSGYSW | 381 | PRDM7 | ENSG00000126856 | Probable histone-lysine N-methyltransferase |
| | | | | | PRDM7 (EC 2.1.1.43)(PR domain zinc finger |
| | | | | | protein 7)(PR domain-containing protein 7) |
| 468 | HLA-B*44:03_EEQNLVAFQY | 382 | PRDM7 | ENSG00000126856 | Probable histone-lysine N-methyltransferase |
| | | | | | PRDM7 (EC 2.1.1.43)(PR domain zinc finger |
| | | | | | protein 7)(PR domain-containing protein 7) |
| 469 | HLA-A*11:01_STEDEEQLLQK | 383 | TDT | ENSG00000107447 | DNA nucleotidylexotransferase (EC 2.7.7.31) |
| | | | | | (Terminal addition enzyme)(Teiminal |
| | | | | | deoxynucleotidyltransfemse)(Terminal |
| | | | | | transferase) |
| 470 | HLA-C*16:01_ASIDREIAM | 384 | PRD13 | ENSG00000112238 | PR domain zinc finger protein 13 (EC 2.1.1.-) |
| | | | | | (PR domain-containing protein 13) |
| 471 | HLA-A*03:01_RLGPVPGTFK | 385 | PRD13 | ENSG00000112238 | PR domain zinc finger protein 13 (EC 2.1.1.-) |
| | | | | | (PR domain-containing protein 13) |
| 472 | HLA-A*11:01_SSSQTAAQVTK | 386 | BRDT | ENSG00000137948 | Brodomain testis-specific protein |
| | | | | | (Cancer/testis antigen 9)(CT9)(RING3-like |
| | | | | | protein) |
| 473 | HLA-B*44:02_AEMAVGLVVF | 282 | COX8C | ENSG00000187581 | Cytochrome c oxidase subunit 8C, mitochondrial |
| | | | | | (Cytochrome c oxidase polypeptide 8 isoform 3) |
| | | | | | (Cytochrome c oxidase polypeptide VIII isoform |
| | | | | | 3)(COX VIII-3)(Cytochrome c oxidase subunit |
| | | | | | 8-3)(COX8-3)(Cytochrome c oxidase subunit |
| | | | | | VIIIC) |
| 474 | HLA-A*02:07_FLDLQVNSL | 387 | TERT | ENSG00000164362 | Telomerase reverse transcriptase (EC 2.7.7.49) |
| | | | | | (HEST2)(Telomerase catalytic subunit) |
| | | | | | (Telomerase-associated protein 2)(TP2) |
| 475 | HLA-A*29:02_VLREIEDEWLY | 388 | DPPA3 | ENSG00000187569 | Developmental pluripotency-associated protein 3 |
| | | | | | (Stella-related protein) |
| 476 | HLA-B*18:01_DESITFHSI | 389 | 1A1L2 | ENSG00000205126 | Probable inactive 1-aminocyclopropane-1- |
| | | | | | carboxylate synthase-like protein 2 (ACC |
| | | | | | synthase-like protein 2) |
| 477 | HLA-B*18:01_EEVARFLTY | 390 | 1A1L2 | ENSG00000205126 | Probable inactive 1-aminocyclopropane-1- |
| | | | | | carboxylate synthase-like protein 2 (ACC |
| | | | | | synthase-like protein 2) |
| 478 | HLA-B*44:03_EEVARFLTY | 390 | 1A1L2 | ENSG00000205126 | Probable inactive 1-aminocyclopropane-1- |
| | | | | | carboxylate synthase-like protein 2 (ACC |
| | | | | | synthase-like protein 2) |
| 479 | HLA-A*26:01_EVASAVSAF | 391 | 1A1L2 | ENSG00000205126 | Probable inactive 1-aminocyclopropane-1- |
| | | | | | carboxylate synthase-like protein 2 (ACC |
| | | | | | synthase-like protein 2) |
| 480 | HLA-A*02:07_LLPGSIHFV | 392 | PTX4 | ENSG00000251692 | Pentraxin-4 |
| 481 | HLA-B*44:03_EEQLLQKVM | 393 | TDT | ENSG00000107447 | DNA nucleotidylexotransferase (EC 2.7.7.31) |
| | | | | | (Terminal addition enzyme)(Teiminal |
| | | | | | deoxynucleotidyltransfemse)(Terminal |
| | | | | | transferase) |
| 482 | HLA-A*02:07_KVLEFLAKV | 394 | MAGB2 | ENSG00000099399 | Melanoma-associated antigen B2 (Cancer/testis |
| | | | | | antigen 3.2)(CT3.2)(DSS-AHC critical interval |
| | | | | | MAGE supeifamily 6)(DAM6)(MAGE XP-2 |
| | | | | | antigen)(MAGE-B2 antigen) |
| 483 | HLA-A*02:07_SLDDIIIYKEL | 395 | LUZP4 | ENSG00000102021 | Leucine zipper protein 4 (Cancer/testis antigen |
| | | | | | 28)(CT-28)(CT28)(Tumor antigen HOM-TES- |
| | | | | | 85) |
| 484 | HLA-B*44:03_KEGEAVEFTF | 396 | LN28A | ENSG00000131914 | Protein lin-28 homolog A (Lin-28A)(Zinc finger |
| | | | | | CCHC domain-containing protein 1) |
| 485 | HLA-B*18:01_DEGAMLLY | 397 | NALP7 | ENSG00000167634 | NACHT, LRR and PYD domains-containing |
| | | | | | protein 7 (Nucleotide-binding oligomerization |
| | | | | | domain protein 12)(PYRIN-containing APAF1- |
| | | | | | like protein 3) |
| 486 | HLA-A*11:01_KTYETNLEIK | 398 | NALP7 | ENSG00000167634 | NACHT, LRR and PYD domains-containing |
| | | | | | protein 7 (Nucleotide-binding oligomerization |
| | | | | | domain protein 12)(PYRIN-containing APAF1- |
| | | | | | like protein 3) |
| 487 | HLA-A*01:01_LLDEGAMLLY | 399 | NALP7 | ENSG00000167634 | NACHT, LRR and PYD domains-containing |
| | | | | | protein 7 (Nucleotide-binding oligomerization |
| | | | | | domain protein 12)(PYRIN-containing APAF1- |
| | | | | | like protein 3) |
| 488 | HLA-B*35:01_TPLVIAISY | 400 | NPBW1 | ENSG00000183729 | Neuropeptides B/W receptor type 1(G-protein |
| | | | | | coupled receptor 7) |
| 489 | HLA-B*44:03_VEVGEVKSW | 401 | RFPLB | ENSG00000251258 | Ret finger protein-like 4B (RING finger protein |
| | | | | | 211) |
| 490 | HLA-C*02:02_VEVGEVKSW | 401 | RFPLB | ENSG00000251258 | Ret finger protein-like 4B (RING finger protein |
| | | | | | 211) |
| 491 | HLA-B*44:03_WEVEVGEVKSW | 402 | RFPLB | ENSG00000251258 | Ret finger protein-like 4B (RING finger protein |
| | | | | | 211) |
| 492 | HLA-A*26:01_TTAPGTVHSY | 403 | Q5JUY5 | ENSG00000117400 | Thrombopoietin receptor |
| 493 | HLA-C*16:01_ASSQVPRVM | 404 | PABP3 | ENSG00000151846 | Polyadenylate-binding protein 3 (PABP-3) |
| | | | | | (Poly(A)-binding protein 3)(Testis-specific |
| | | | | | poly(A)-binding protein) |
| 494 | HLA-A*01:01_WSDSSVTTY | 405 | CD051 | ENSG00000237136 | Uncharacterized protein C4orf51 |
| 495 | HLA-C*02:02_KAFDDIATY | 406 | SSX1 | ENSG00000126752 | Protein SSX1 (Cancer/testis antigen 5.1)(CT5.1) |
| | | | | | (Synovial sarcoma, X breakpoint 1) |
| 496 | HLA-A*29:02_HVSNLVFAY | 407 | CTSRD | ENSG00000174898 | Cation channel sperm-associated protein subunit |
| | | | | | delta (CatSper-delta)(CatSperdelta) |
| | | | | | (Transmembrane protein 146) |
| 497 | HLA-A29:02_ILGSVWLAY | 408 | CTSRD | ENSG00000174898 | Cation channel sperm-associated protein subunit |
| | | | | | delta (CatSper-delta)(CatSperdelta) |
| | | | | | (Transmembrane protein 146) |
| 498 | HLA-B*44:03_KEFGGPFFW | 409 | CTSRD | ENSG00000174898 | Cation channel sperm-associated protein subunit |
| | | | | | delta (CatSper-delta)(CatSperdelta) |
| | | | | | (Transmembrane protein 146) |
| 499 | HLA-B*35:01_LPFTIPTSM | 410 | CTSRD | ENSG00000174898 | Cation channel sperm-associated protein subunit |
| | | | | | delta (CatSper-delta)(CatSperdelta) |
| | | | | | (Transmembrane protein 146) |
| 500 | HLA-A*11:01_VVNQGKGMFK | 411 | CTSRD | ENSG00000174898 | Cation channel sperm-associated protein subunit |
| | | | | | delta (CatSper-delta)(CatSperdelta) |
| | | | | | (Transmembrane protein 146) |
| 501 | HLA-A*24:02_VYGAFPVQL | 412 | CTSRD | ENSG00000174898 | Cation channel sperm-associated protein subunit |
| | | | | | delta (CatSper-delta)(CatSperdelta) |
| | | | | | (Transmembrane protein 146) |
| 502 | HLA-A*01:01_YTSDGNTKY | 413 | CTSRD | ENSG00000174898 | Cation channel sperm-associated protein subunit |
| | | | | | delta (CatSper-delta)(CatSperdelta) |
| | | | | | (Transmembrane protein 146) |
| 503 | HLA-A*24:02_VYGSYLYKL | 414 | DPPA5 | ENSG00000203909 | Developmental pluripotency-associated 5 protein |
| | | | | | (hDPPA5)(Embtyonal stem cell-specific gene 1 |
| | | | | | protein)(ESG-1) |
| 504 | HLA-A*30:02_QISEVEPKY | 415 | NAA11 | ENSG00000156269 | N-alpha-acetyltransferase 11 (EC 2.3.1.255)(N- |
| | | | | | tenninal acetyltransferase complex ARD1 subunit |
| | | | | | homolog B)(hARD2)(NatA catalytic subunit |
| | | | | | Naa11) |
| 505 | HLA-A*29:02_HAPNLPYRY | 416 | I22R2 | ENSG00000164485 | Interleukin-22 receptor subunit alpha-2 (IL-22 |
| | | | | | receptor subunit alpha-2)(IL-22R-alpha-2)(IL- |
| | | | | | 22RA2)(Cytokine receptor class-II member 10) |
| | | | | | (Cytokine receptor family 2 member 10)(CRF2- |
| | | | | | 10)(Cytokine receptor family type 2, soluble 1) |
| | | | | | (CRF2-S1)(Interleukin-22-binding protein)(IL- |
| | | | | | 22BP)(IL22BP)(ZcytoR16) |
| 506 | HLA-B*35:01_LPFDGSPKITY | 417 | ERVV2 | ENSG00000268964 | Endogenous retrovirus group V member 2 Env |
| | | | | | polyprotein (HERV-V_19q13.41 provirus |
| | | | | | ancestral Env polyprotein 2) |
| 507 | HLA-B*51:01_LPFDGSPKI | 418 | ERVV2 | ENSG00000268964 | Endogenous retrovirus group V member 2 Env |
| | | | | | polyprotein (HERV-V_19q13.41 provirus |
| | | | | | ancestral Env polyprotein 2) |
| 508 | HLA-A*11:01_SVIGGPSTYK | 419 | ERVV2 | ENSG00000268964 | Endogenous retrovirus group V member 2 Env |
| | | | | | polyprotein (HERV-V_19q13.41 provirus |
| | | | | | ancestral Env polyprotein 2) |
| 509 | HLA-A*03:01_TIYNTTQPRQK | 420 | ERVV2 | ENSG00000268964 | Endogenous retrovirus group V member 2 Env |
| | | | | | polyprotein (HERV-V_19q13.41 provirus |
| | | | | | ancestral Env polyprotein 2) |
| 510 | HLA-B*35:01_EAFLSPEY | 421 | PPAT | ENSG00000142513 | Testicular acid phosphatase (EC 3.1.3.2) |
| 511 | HLA-C*16:01_AAMNIARAL | 422 | RNF17 | ENSG00000132972 | RING finger protein 17 (Tudor domain-containing protein 4) |
| 512 | HLA-A*11:01_ASYEIGYILK | 423 | RNF17 | ENSG00000132972 | RING finger protein 17 (Tudor domain-containing protein 4) |
| 513 | HLA-A*26:01_EVVGGAVRVQY | 424 | RNF17 | ENSG00000132972 | RING finger protein 17 (Tudor domain-containing protein 4) |
| 514 | HLA-B*46:01_LVKEGLASY | 425 | RNF17 | ENSG00000132972 | RING finger protein 17 (Tudor domain-containing protein 4) |
| 515 | HLA-A*02:01_ALYDGLTLV | 426 | VRTN | ENSG00000133980 | Vertnin |
| 516 | HLA-A*02:01_SLLKLIVEL | 427 | TRIMM | ENSG00000179046 | Probable E3 ubiquitin-protein ligase TRIML2 |
| | | | | | (EC 2.3.2.27)(RING-type E3 ubiquitin |
| | | | | | transferase TRIML2)(SPRY domain-containing |
| | | | | | protein 6)(Tripartite motif family-like protein 2) |
| 517 | HLA-B*35:01_IASNYNVSY | 428 | PTX4 | ENSG00000251692 | Pentraxin-4 |
| 518 | HLA-A*30:02_RQAPGSDPVRY | 429 | MAGA8 | ENSG00000156009 | Melanoma-associated antigen 8 (Cancer/testis |
| | | | | | antigen 1.8)(CT1.8)(MAGE-8 antigen) |
| 519 | HLA-B*44:02_AEMLTNVISRY | 297 | MAGC1 | ENSG00000155495 | Melanoma-associated antigen C1 (Cancer/testis |
| | | | | | antigen 7.1)(CT7.1)(MAGE-C1 antigen) |
| 520 | HLA-B*46:01_STKSVSTSY | 301 | 5HT1F | ENSG00000179097 | 5-hydroxyttyptamine receptor 1F (5-HT-1F)(5- |
| | | | | | HT1F)(Serotonin receptor 1F) |
| 521 | HLA-B*35:01_MAATGVSSM | 430 | SAGE1 | ENSG00000181433 | Sarcoma antigen 1 (Cancer/testis antigen 14) |
| | | | | | (CT14) |
| 522 | HLA-A*33:01_DTSPLLLGR | 431 | TIFAB | ENSG00000255833 | TRAF-interacting protein with FHA domain- |
| | | | | | containing protein B (TWA-like protein) |
| 523 | HLA-A*29:02_HVSPSPLIY | 432 | TIFAB | ENSG00000255833 | TRAF-interacting protein with FHA domain- |
| | | | | | containing protein B (TWA-like protein) |
| 524 | HLA-B*35:01_HVSPSPLIY | 432 | TIFAB | ENSG00000255833 | TRAF-interacting protein with FHA domain- |
| | | | | | containing protein B (TWA-like protein) |
| 525 | HLA-A*29:02_WVNGLTLRY | 433 | TIFAB | ENSG00000255833 | TRAF-interacting protein with FHA domain- |
| | | | | | containing protein B (TWA-like protein) |
| 526 | HLA-A*11:01_GTISFVQYK | 434 | J3KR52 | ENSG00000185055 | EF-hand calcium-binding domain-containing |
| | | | | | protein 10 |
| 527 | HLA-C*04:01_AFVTMTGGF | 435 | TDT | ENSG00000107447 | DNA nucleotidylexotransferase (EC 2.7.7.31) |
| | | | | | (Terminal addition enzyme)(Terminal |
| | | | | | deoxynucleotidyltransfemse)(Terminal |
| | | | | | transferase) |
| 528 | HLA-A*29:02_NLWEKKGLLLY | 436 | TDT | ENSG00000107447 | DNA nucleotidylexotransferase (EC 2.7.7.31) |
| | | | | | (Terminal addition enzyme)(Terminal |
| | | | | | deoxynucleotidyltransfemse)(Terminal |
| | | | | | transferase) |
| 529 | HLA-A*26:01_EVISQLTRV | 437 | SYCY1 | ENSG00000242950 | Syncytin-1 (Endogenous retrovirus group W |
| | | | | | member 1)(Env-W)(Envelope polyprotein |
| | | | | | gPr73)(Enverin)(HERV-7q Envelope protein) |
| | | | | | (HERV-W envelope protein)(HERV-W_7q21.2 |
| | | | | | provirus ancestral Env polyprotein)(Syneytin) |
| | | | | | [Cleaved into: Surface protein (SU)(gp50); |
| | | | | | Transmembrane protein (TM)(gp24)] |
| 530 | HLA-A*01:01_YTEQDLYSY | 438 | SYCY1 | ENSG00000242950 | Syneytin-1 (Endogenous retrovirus group W |
| | | | | | member 1)(Env-W)(Envelope polyprotein |
| | | | | | gPr73)(Enverin)(HERV-7q Envelope protein) |
| | | | | | (HERV-W envelope protein)(HERV-W_7q21.2 |
| | | | | | provirus ancestral Env polyprotein)(Syncytin) |
| | | | | | [Cleaved into: Surface protein (SU)(gp50); |
| | | | | | Transmembrane protein (TM)(gp24)] |
| 531 | HLA-A*24:02_NYFLDPVTI | 439 | TRI51 | ENSG00000124900 | Tripartite motif-containing protein 51 (SPRY |
| | | | | | domain-containing protein 5) |
| 532 | HLA-A*02:07_AVDEESPFL | 440 | HDGL1 | ENSG00000112273 | Hepatoma-derived growth factor-like protein 1 |
| | | | | | (PWWP domain-containing protein 1) |
| 533 | HLA-B*51:01_TPYHLSTVV | 441 | NPBW1 | ENSG00000183729 | Neuropeptides B/W receptor type 1(G-protein |
| | | | | | coupled receptor 7) |
| 534 | HLA-A*01:01_NLDHYTNAY | 442 | GLYL3 | ENSG00000203972 | Glycine N-acyltransferase-like protein 3 (EC |
| | | | | | 2.3.1.-) |
| 535 | HLA-B*51:01_DAFDVASFL | 443 | STRA8 | ENSG00000146857 | Stimulated by retinoic acid gene 8 protein |
| | | | | | homolog |
| 536 | HLA-A*29:02_RTFPITGLRY | 444 | DYTN | ENSG00000232125 | Dystrotelin |
| 537 | HLA-A*01:01_FTEEDLHFVLY | 445 | PRD14 | ENSG00000147596 | PR domain zinc finger protein 14 (EC 2.1.1.-) |
| | | | | | (PR domain-containing protein 14) |
| 538 | HLA-A*29:02_IFVSPKGVLAY | 446 | S7A13 | ENSG00000164893 | Solute carrier family 7 member 13 (Sodium- |
| | | | | | independent aspartate/glutamate transporter 1) |
| | | | | | (X-amino acid transporter 2) |
| 539 | HLA-B*44:03_QEGQLPLLF | 447 | S7A13 | ENSG00000164893 | Solute carrier family 7 member 13 (Sodium- |
| | | | | | independent aspartate/glutamate transporter 1) |
| | | | | | (X-amino acid transporter 2) |
| 540 | HLA-A*02:01_LLAQQPIYV | 448 | NALP7 | ENSG00000167634 | NACHT, LRR and PYD domains-containing |
| | | | | | protein 7 (Nucleotide-binding oligomerization |
| | | | | | domain protein 12)(PYRIN-containing APAF1- |
| | | | | | like protein 3) |
| 541 | HLA-B*51:01_LPFTIISM | 341 | TDT | ENSG00000107447 | DNA nucleotidylexotransferase (EC 2.7.7.31) |
| | | | | | (Terminal addition enzyme)(Terminal |
| | | | | | deoxynucleotidyltransfemse)(Terminal |
| | | | | | transferase) |
| 542 | HLA-A*11:01_AVIEHMQEK | 449 | AXDN1 | ENSG00000162779 | Axonemal dynein light chain domain-containing |
| | | | | | protein 1 |
| 543 | HLA-B44:03_EEIIKNIQKLY | 450 | AXDN1 | ENSG00000162779 | Axonemal dynein light chain domain-containing |
| | | | | | protein 1 |
| 544 | HLA-A*02:01_YLIDHPVSL | 451 | AXDN1 | ENSG00000162779 | Axonemal dynein light chain domain-containing |
| | | | | | protein 1 |
| 545 | HLA-A*02:07_YLIDHPVSL | 451 | AXDN1 | ENSG00000162779 | Axonemal dynein light chain domain-containing |
| | | | | | protein 1 |
| 546 | HLA-A*24:02_IYISNSIYF | 452 | CT55 | ENSG00000169551 | Cancer/testis antigen 55 (Tumor antigen BJ- |
| | | | | | HCC-20) |
| 547 | HLA-A*11:01_VVTGNVPLK | 453 | CT55 | ENSG00000169551 | Cancer/testis antigen 55 (Tumor antigen BJ- |
| | | | | | HCC-20) |
| 548 | HLA-A*11:01_ASMSLPPPK | 454 | U3KQD4 | ENSG00000105549 | Testicular haploid-expressed gene protein (Theg |
| | | | | | homolog (Mouse), isoform CRA a) |
| 549 | HLA-C 16:01_VASPRIISL | 455 | U3KQD4 | ENSG00000105549 | Testicular haploid-expressed gene protein (Theg |
| | | | | | homolog (Mouse), isoform CRA a) |
| 550 | HLA-A*29:02_MILDNHALY | 456 | TDT | ENSG00000107447 | DNA nucleotidylexotransferase (EC 2.7.7.31) |
| | | | | | (Terminal addition enzyme)(Terminal |
| | | | | | deoxynucleotidyltransfemse)(Terminal |
| | | | | | transferase) |
| 551 | HLA-A*02:07_TLDEKVDEL | 457 | MAGC1 | ENSG00000155495 | Melanoma-associated antigen C1 (Cancer/testis |
| | | | | | antigen 7.1)(CT7.1)(MAGE-C1 antigen) |
| 552 | HLA-B*35:01_LAFGGHIAF | 458 | S6A18 | ENSG00000164363 | Sodium-dependent neutral amino acid transporter |
| | | | | | B(0)AT3 (Sodium-and chloride-dependent |
| | | | | | transporter XTRP2)(Solute carrier family 6 |
| | | | | | member 18)(System B(0) neutral amino acid |
| | | | | | transporter AT3) |
| 553 | HLA-A*30:02_ALASVGHLY | 288 | ONEC3 | ENSG00000205922 | One cut domain family member 3 (One cut |
| | | | | | homeobox 3)(Transcription factor ONECUT-3) |
| | | | | | (OC-3) |
| 554 | HLA-B*35:01_APLGAAAAY | 459 | NKX24 | ENSG00000125816 | Homeobox protein Nkx-2.4 (Homeobox protein |
| | | | | | NK-2 homolog D) |
| 555 | HLA-A*29:02_GLFTHTIFY | 460 | NDST4 | ENSG00000138653 | Bifunctional heparan sulfate N-deacetylase/N- |
| | | | | | sulfotransferase 4 (EC 2.8.2.8)(Glucosaminyl N- |
| | | | | | deacetylase/N-sulfotransferase 4)(NDST-4)(N- |
| | | | | | heparan sulfate sulfotransferase 4)(N-HSST 4) |
| | | | | | [Includes: Heparan sulfate N-deacetylase 4 (EC |
| | | | | | 3.-.-.-); Heparan sulfate N-sulfotransferase 4 (EC |
| | | | | | 2.8.2.-)] |
| 556 | HLA-B*51:01_VPKAKIITI | 461 | NDST4 | ENSG00000138653 | Bifunctional heparan sulfate N-deacetylase/N- |
| | | | | | sulfotransferase 4 (EC 2.8.2.8)(Glucosaminyl N- |
| | | | | | deacetylase(N-sulfotransferase 4)(NDST-4)(N- |
| | | | | | heparan sulfate sulfotransferase 4)(N-HSST 4) |
| | | | | | [Includes: Heparan sulfate N-deacetylase 4 (EC |
| | | | | | 3.-.-.-); Heparan sulfate N-sulfotransferase 4 (EC |
| | | | | | 2.8.2.-)] |
| 557 | HLA-A*01:01_HTEDKPYKY | 462 | ZN729 | ENSG00000196350 | Zinc finger protein 729 |
| 558 | HLA-A*01:01_HSDSERQYY | 463 | FGF16 | ENSG00000196468 | Fibroblast growth factor 16 (FGF-16) |
| 559 | HLA-A*02:07_SLDWDLHGF | 464 | FGF16 | ENSG00000196468 | Fibroblast growth factor 16 (FGF-16) |
| 560 | HLA-A*31:01_QVKIWFQNR | 110 | HXB1 | ENSG00000120094 | Homeobox protein Hox-B1 (Homeobox protein |
| | | | | | Hox-2I) |
| 561 | HLA-A*11:01_TSLDVPLIGK | 465 | ACHB4 | ENSG00000117971 | Neuronal acetylcholine receptor subunit beta-4 |
| 562 | HLA-B*44:03_EEDLHFVLY | 466 | PRD14 | ENSG00000147596 | PR domain zinc finger protein 14 (EC 2.1.1.-) |
| | | | | | (PR domain-containing protein 14) |
| 563 | HLA-B*46:01_SVVAHLSTY | 61 | ACTL8 | ENSG00000117148 | Actin-like protein 8 (Cancer/testis antigen 57) |
| | | | | | (CT57) |
| 564 | HLA-B*44:03_SEAQDKSKLW | 467 | BRDT | ENSG00000137948 | Brodomain testis-specific protein |
| | | | | | (Cancer/testis antigen 9)(CT9)(RING3-like |
| | | | | | protein) |
| 565 | HLA-A*29:02_AVYNGQWKY | 468 | ESPB1 | ENSG00000169393 | Epididymal sperm-binding protein 1 (Epididymal |
| | | | | | secretory protein 12)(hE12) |
| 566 | HLA-A*11:01_SVTSVFDEK | 469 | ESPB1 | ENSG00000169393 | Epididymal sperm-binding protein 1 (Epididymal |
| | | | | | secretory protein 12)(hE12) |
| 567 | HLA-A*02:01_ALMEVTVYL | 470 | NAL11 | ENSG00000179873 | NACHT, LRR and PYD domains-containing |
| | | | | | protein 11 (Nucleotide-binding oligomerization |
| | | | | | domain protein 17)(PAAD-and NACHT domain- |
| | | | | | containing protein 10)(PYRIN-containing |
| | | | | | APAF1-like protein 6) |
| 568 | HLA-B*44:03_EELANVLPISY | 471 | NAL11 | ENSG00000179873 | NACHT, LRR and PYD domains-containing |
| | | | | | protein 11 (Nucleotide-binding oligomerization |
| | | | | | domain protein 17)(PAAD-and NACHT domain- |
| | | | | | containing protein 10)(PYRIN-containing |
| | | | | | APAF1-like protein 6) |
| 569 | HLA-B*44:03_SEAGLTANQY | 472 | NAL11 | ENSG00000179873 | NACHT, LRR and PYD domains-containing |
| | | | | | protein 11 (Nucleotide-binding oligomerization |
| | | | | | domain protein 17)(PAAD-and NACHT domain- |
| | | | | | containing protein 10)(PYRIN-containing |
| | | | | | APAF1-like protein 6) |
| 570 | HLA-C*02:02_SEAGLTANQY | 472 | NAL11 | ENSG00000179873 | NACHT, LRR and PYD domains-containing |
| | | | | | protein 11 (Nucleotide-binding oligomerization |
| | | | | | domain protein 17)(PAAD-and NACHT domain- |
| | | | | | containing protein 10)(PYRIN-containing |
| | | | | | APAF1-like protein 6) |
| 571 | HLA-A*29:02_VFYILQLAY | 473 | NAL11 | ENSG00000179873 | NACHT, LRR and PYD domains-containing |
| | | | | | protein 11 (Nucleotide-binding oligomerization |
| | | | | | domain protein 17)(PAAD-and NACHT domain- |
| | | | | | containing protein 10)(PYRIN-containing |
| | | | | | APAF1-like protein 6) |
| 572 | HLA-A*11:01_STVDPMKLYEK | 474 | GCM1 | ENSG00000137270 | Chorion-specific transcription factor GCMa |
| | | | | | (hGCMa)(GCM motif protein 1)(Glia1 cells |
| | | | | | missing homolog 1) |
| 573 | HLA-B35:01_SAVTPGPYY | 366 | SPT22 | ENSG00000141255 | Spermatogenesis-associated protein 22 (Testis |
| | | | | | development protein NYD-SP20) |
| 574 | HLA-A02:07_YLDLRNTGL | 475 | LRC52 | ENSG00000162763 | Leucine-rich repeat-containing protein 52 (BK |
| | | | | | channel auxilialy gamma subunit LRRC52) |
| 575 | HLA-A*11:01_ATIDVTTVER | 476 | PCDC1 | ENSG00000248383 | Protocadherin alpha-C 1 (PCDH-alpha-C1) |
| 576 | HLA-B*51:01_DPLELHKI | 477 | PCDC1 | ENSG00000248383 | Protocadherin alpha-C 1 (PCDH-alpha-C1) |
| 577 | HLA-A*02:07_TVADPLPQV | 230 | A0A1B0GTI6 | ENSG00000268655 | HCG1796489 |
| 578 | HLA-B*35:01_SPEAGLAEY | 478 | FHL17 | ENSG00000132446 | Ferritin heavy polypeptide-like 17 (Cancer/testis |
| | | | | | antigen 38)(CT38) |
| 579 | HLA-B*51:01_IPMDGTAVI | 479 | CALI | ENSG00000185972 | Calicin |
| 580 | HLA-A*01:01_GSEVSFLEY | 480 | PIWL1 | ENSG00000125207 | Piwi-like protein 1 (EC 3.1.26.-) |
| 581 | HLA-B*44:02_KEFGGPFFW | 409 | CTSRD | ENSG00000174898 | Cation channel sperm-associated protein subunit |
| | | | | | delta (CatSper-delta)(CatSperdelta) |
| | | | | | (Transmembrane protein 146) |
| 582 | HLA-A*11:01_AAGALPLLK | 481 | GSX2 | ENSG00000180613 | GS homeobox 2 (Genetic-screened homeobox 2) |
| | | | | | (Homeobox protein GSH-2) |
| 583 | HLA-A*11:01_ATYLNLSEK | 482 | GSX2 | ENSG00000180613 | GS homeobox 2 (Genetic-screened homeobox 2) |
| | | | | | (Homeobox protein GSH-2) |
| 584 | HLA-B*51:01_MPPPLVMSV | 483 | GSX2 | ENSG00000180613 | GS homeobox 2 (Genetic-screened homeobox 2) |
| | | | | | (Homeobox protein GSH-2) |
| 585 | HLA-A*31:01_QVKIWFQNR | 110 | GSX2 | ENSG00000180613 | GS homeobox 2 (Genetic-screened homeobox 2) |
| | | | | | (Homeobox protein GSH-2) |
| 586 | HLA-B*51:01_VPPWNPQLI | 484 | ADIG | ENSG00000182035 | Adipogenin |
| 587 | HLA-C*04:01_MFDNGSFL | 485 | FOXE3 | ENSG00000186790 | Forkhead box protein E3 (Forkhead-related |
| | | | | | protein FKHL12)(Forkhead-related transcription |
| | | | | | factor 8)(FREAC-8) |
| 588 | HLA-A*11:01_KSGDLVFAK | 486 | HDGL1 | ENSG00000112273 | Hepatoma-derived growth factor-like protein 1 |
| | | | | | (PWWP domain-containing protein 1) |
| 589 | HLA-A*31:01_ATKSGLVVR | 487 | GCNT7 | ENSG00000124091 | Beta-1,3-galactosyl-O-glycosyl-glycoprotein |
| | | | | | beta-1,6-N-acetylgluco saminyltransferase 7 (EC |
| | | | | | 2.4.1.-) |
| 590 | HLA-B*51:01_LAPPIGNSI | 488 | F71F1 | ENSG00000135248 | Protein FAM71F1 (Protein FAM137A)(Testis |
| | | | | | development protein NYD-SP18) |
| 591 | HLA-B*44:03_EEGEDRDGHAW | 489 | NALP7 | ENSG00000167634 | NACHT, LRR and PYD domains-containing |
| | | | | | protein 7 (Nucleotide-binding oligomerization |
| | | | | | domain protein 12)(PYRIN-containing APAF1- |
| | | | | | like protein 3) |
| 592 | HLA-A*24:02_EYLKDPVTI | 490 | TRI60 | ENSG00000176979 | Tripartite motif-containing protein 60 (RING |
| | | | | | finger protein 129)(RING finger protein 33) |
| 593 | HLA-B*44:03_SEFEQIRLF | 491 | TRI60 | ENSG00000176979 | Tripartite motif-containing protein 60 (RING |
| | | | | | finger protein 129)(RING finger protein 33) |
| 594 | HLA-B*18:01SEVSFLEYY | 94 | PIWL1 | ENSG00000125207 | Piwi-like protein 1 (BC 3.1.26.-) |
| 595 | HLA-A*11:01_AGISSTITR | 492 | SAGE1 | ENSG00000181433 | Sarcoma antigen 1 (Cancer/testis antigen 14) |
| | | | | | (CT14) |
| 596 | HLA-B*18:01_EETRVLAF | 493 | FOXR2 | ENSG00000189299 | Forkhead box protein R2 (Forkhead box protein |
| | | | | | N6) |
| 597 | HLA-A*11:01_SSEQSPLQK | 494 | FOXR2 | ENSG00000189299 | Forkhead box protein R2 (Forkhead box protein |
| | | | | | N6) |
| 598 | HLA-A*02:01_ALYSGDLHAA | 495 | E5RK72 | ENSG00000215262 | Potassium channel subfamily U member 1 |
| 599 | HLA-B*18:01_EEFSLQKSY | 496 | E5RK72 | ENSG00000215262 | Potassium channel subfamily U member 1 |
| 600 | HLA-B*44:03_EEFSLQKSY | 496 | E5RK72 | ENSG00000215262 | Potassium channel subfamily U member 1 |
| 601 | HLA-C*02:02_EEFSLQKSY | 496 | E5RK72 | ENSG00000215262 | Potassium channel subfamily U member 1 |
| 602 | HLA-A*02:07_FLDSLLATL | 497 | E5RK72 | ENSG00000215262 | Potassium channel subfamily U member 1 |
| 603 | HLA-B*35:01_HAEDISNIM | 498 | E5RK72 | ENSG00000215262 | Potassium channel subfamily U member 1 |
| 604 | HLA-A*11:01_STVGFGDVVAK | 499 | E5RK72 | ENSG00000215262 | Potassium channel subfamily U member 1 |
| 605 | HLA-B*35:01_TAFSTGTVF | 500 | E5RK72 | ENSG00000215262 | Potassium channel subfamily U member 1 |
| 606 | HLA-A*02:07_TVDSVTAFL | 501 | E5RK72 | ENSG00000215262 | Potassium channel subfamily U member 1 |
| 607 | HLA-A*11:01_GVAALTPVQK | 502 | ANHX | ENSG00000227059 | Anomalous homeobox protein |
| 608 | HLA-A*02:01_HLLDNADVAL | 503 | ANHX | ENSG00000227059 | Anomalous homeobox protein |
| 609 | HLA-A*02:07_LLDNADVAL | 504 | ANHX | ENSG00000227059 | Anomalous homeobox protein |
| 610 | HLA-C*02:02_IEAELHISY | 254 | SYCY2 | ENSG00000244476 | Syncytin-2 (Endogenous retrovirus group FRD |
| | | | | | member 1)(Envelope polyprotein)(HERV-FRD) |
| | | | | | (HERV-FRD 6p24.1 provims ancestral Env |
| | | | | | polyprotein)[Cleaved into: Surface protein (SU); |
| | | | | | Transmembrane protein (TM)] |
| 611 | HLA-B*18:01_TETPGTAY | 505 | SYCY2 | ENSG00000244476 | Syncytin-2 (Endogenous retrovirus group FRD |
| | | | | | member 1)(Envelope polyprotein)(HERV-FRD) |
| | | | | | (HERV-FRD 6p24.1 provirus ancestral Env |
| | | | | | polyprotein)[Cleaved into: Surface protein (SU); |
| | | | | | Transmembrane protein (TM)] |
| 612 | HLA-C*01:02_TGPSGNAL | 506 | S22AD | ENSG00000172940 | Solute carrier family 22 member 13 (Organic |
| | | | | | cation transporter-like 3)(ORCTL-3) |
| 613 | HLA-A*11:01_ASFLTTVFK | 507 | NALP9 | ENSG00000185792 | NACHT, LRR and PYD domains-containing |
| | | | | | protein 9 (Nucleotide-binding oligomerization |
| | | | | | domain protein 6)(PYRIN and NACHT- |
| | | | | | containing protein 12) |
| 614 | HLA-A*24:02_IYIGNIEHL | 508 | NALP9 | ENSG00000185792 | NACHT, LRR and PYD domains-containing |
| | | | | | protein 9 (Nucleotide-binding oligomerization |
| | | | | | domain protein 6)(PYRIN and NACHT- |
| | | | | | containing protein 12) |
| 615 | HLA-B*51:01_DAFPISLI | 509 | CXA10 | ENSG00000135355 | Gap junction alpha-10 protein (Connexin-62) |
| | | | | | (Cx62) |
| 616 | HLA-A*30:02_KTLAEISDRY | 510 | X1WI33 | ENSG00000170788 | DPY30 domain-containing protein 1 (Fragment) |
| 617 | HLA-A*11:01_VTMEQLRQK | 511 | X1WI33 | ENSG00000170788 | DPY30 domain-containing protein 1 (Fragment) |
| 618 | HLA-B*08:01_HAYHKVTL | 512 | CF010 | ENSG00000204296 | Uncharacterized protein C6orf10 |
| 619 | HLA-A*01:01_QSEMYISRY | 513 | CF010 | ENSG00000204296 | Uncharacterized protein C6orf10 |
| 620 | HLA-A*01:01_SSEQSARLLDY | 514 | CF010 | ENSG00000204296 | Uncharacterized protein C6orf10 |
| 621 | HLA-A*11:01_ATAQPSQVR | 515 | FHL17 | ENSG00000132446 | Ferritin heavy polypeptide-like 17 (Cancer/testis |
| | | | | | antigen 38)(CT38) |
| 622 | HLA-A*26:01_DIISEQKVSEF | 516 | RNF17 | ENSG00000132972 | RING finger protein 17 (Tudor domain- |
| | | | | | containing protein 4) |
| 623 | HLA-A*02:01_ALLGILISV | 517 | IZUM2 | ENSG00000161652 | Izumo sperm-egg fusion protein 2 |
| 624 | HLA-A*24:02_LYTKAHETF | 518 | MSLNL | ENSG00000162006 | Mesothelin-like protein (Pre-pro-megakroyocyte- |
| | | | | | potentiating-factor-like) |
| 625 | HLA-A*24:02_SYLLGWTTF | 519 | ESPB1 | ENSG00000169393 | Epididymal sperm-binding protein 1 (Epididymal |
| | | | | | secretory protein 12)(hE12) |
| 626 | HLA-C*02:02_AEIEPVSAV | 520 | ZFP42 | ENSG00000179059 | Zinc finger protein 42 homolog (Zfp-42) |
| | | | | | (Reduced expression protein 1)(REX-1)(hREX- |
| | | | | | 1)(Zinc finger protein 754) |
| 627 | HLA-A*11:01_VIIDHGSGFLK | 521 | ACTL8 | ENSG00000117148 | Actin-like protein 8 (Cancer/testis antigen 57) |
| | | | | | (CT57) |
| 628 | HLA-B*51:01_MPYTEAVI | 522 | CP2AD | ENSG00000197838 | Cytochrome P450 2A13 (EC 1.14.14.1) |
| | | | | | (CYPIIA13) |
| 629 | HLA-B*35:01_LPVPLDSAF | 523 | ASCL4 | ENSG00000187855 | Achaete-scute homolog 4 (ASH-4)(hASH4) |
| | | | | | (Achaete-scute-like protein 4)(Class A basic |
| | | | | | helix-loop-helix protein 44)(bHLHa44) |
| 630 | HLA-B*44:03_QELLERQAW | 524 | ASCL4 | ENSG00000187855 | Achaete-scute homolog 4 (ASH-4)(hASH4) |
| | | | | | (Achaete-scute-like protein 4)(Class A basic |
| | | | | | helix-loop-helix protein 44)(bHLHa44) |
| 631 | HLA-B*51:01_DAYLSYTKV | 525 | IRPL2 | ENSG00000189108 | X-linked interleukin-1 receptor accessory protein- |
| | | | | | like 2 (IL-1 receptor accessory protein-like 2) |
| | | | | | (IL-1-RAPL-2)(IL-IRAPL-2)(IL 1RAPL-2) |
| | | | | | (IL1RAPL-2-related protein)(Interleukin-1 |
| | | | | | receptor 9)(IL-1R-9)(11,-1R9)(Three |
| | | | | | immunoglobulin domain-containing IL-1 |
| | | | | | receptor-related 1)(TIGIRR-1) |
| 632 | HLA-A*11:01_STNLKMVSK | 526 | IRPL2 | ENSG00000189108 | X-linked interleukin-1 receptor accessory protein- |
| | | | | | like 2 (IL-1 receptor accessory protein-like 2) |
| | | | | | (IL-1-RAPL-2)(IL-IRAPL-2)(IL 1RAPL-2) |
| | | | | | (IL1RAPL-2-related protein)(Interleukin-1 |
| | | | | | receptor 9)(IL-1R-9)(11,-1R9)(Three |
| | | | | | immunoglobulin domain-containing IL-1 |
| | | | | | receptor-related 1)(TIGIRR-1) |
| 633 | HLA-A*02:07_ALDPPVDVF | 527 | LN28A | ENSG00000131914 | Protein lin-28 homolog A (Lin-28A)(Zinc finger |
| | | | | | CCHC domain-containing protein 1) |
| 634 | HLA-B*35:01_YPLSPTISL | 528 | RBM46 | ENSG00000151962 | Probable RNA-binding protein 46 (Cancer/testis |
| | | | | | antigen 68)(CT68)(RNA-binding motif protein |
| | | | | | 46) |
| 635 | HLA-A*03:01_HILTHANTNK | 529 | ZFP42 | ENSG00000179059 | Zinc finger protein 42 homolog (Zfp-42) |
| | | | | | (Reduced expression protein 1)(REX-1)(hREX- |
| | | | | | 1)(Zinc finger protein 754) |
| 636 | HLA-A*26:01_SVTTYTGSY | 530 | CD051 | ENSG00000237136 | Uncharacterized protein C4orf51 |
| 637 | HLA-A*29:02_AFLIIVFSY | 531 | RXFP2 | ENSG00000133105 | Relaxin receptor 2 (G-protein coupled receptor |
| | | | | | 106)(G-protein coupled receptor affecting |
| | | | | | testicular descent)(Leucine-rich repeat- |
| | | | | | containing G-protein coupled receptor 8)(Relaxin |
| | | | | | family peptide receptor 2) |
| 638 | HLA-A*29:02_FFVGIFDIKY | 532 | RXFP2 | ENSG00000133105 | Relaxin receptor 2 (G-protein coupled receptor |
| | | | | | 106)(G-protein coupled receptor affecting |
| | | | | | testicular descent)(Leucine-rich repeat- |
| | | | | | containing (G-protein coupled receptor 8)(Relaxin |
| | | | | | family peptide receptor 2) |
| 639 | HLA-A*29:02_FVGIFDIKY | 533 | RXFP2 | ENSG00000133105 | Relaxin receptor 2 (G-protein coupled receptor |
| | | | | | 106)(G-protein coupled receptor affecting |
| | | | | | testicular descent)(Leucine-rich repeat- |
| | | | | | containing (G-protein coupled receptor 8)(Relaxin |
| | | | | | family peptide receptor 2) |
| 640 | HLA-A*02:07_ILDDNPITRI | 534 | RXFP2 | ENSG00000133105 | Relaxin receptor 2 (G-protein coupled receptor |
| | | | | | 106)(G-protein coupled receptor affecting |
| | | | | | testicular descent)(Leucine-rich repeat- |
| | | | | | containing G-protein coupled receptor 8)(Relaxin |
| | | | | | family peptide receptor 2) |
| 641 | HLA-A*24:02_LYTLTTNFF | 535 | RXFP2 | ENSG00000133105 | Relaxin receptor 2 (G-protein coupled receptor |
| | | | | | 106)(G-protein coupled receptor affecting |
| | | | | | testicular descent)(Leucine-rich repeat- |
| | | | | | containing G-protein coupled receptor 8)(Relaxin |
| | | | | | family peptide receptor 2) |
| 642 | HLA-B*35:01_MPLTDGISSF | 536 | RXFP2 | ENSG00000133105 | Relaxin receptor 2 (G-protein coupled receptor |
| | | | | | 106)(G-protein coupled receptor affecting |
| | | | | | testicular descent)(Leucine-rich repeat- |
| | | | | | containing G-protein coupled receptor 8)(Relaxin |
| | | | | | family peptide receptor 2) |
| 643 | HLA-B*44:03_TEDIGSKGY | 537 | RXFP2 | ENSG00000133105 | Relaxin receptor 2 (G-protein coupled receptor |
| | | | | | 106)(G-protein coupled receptor affecting |
| | | | | | testicular descent)(Leucine-rich repeat- |
| | | | | | containing G-protein coupled receptor 8)(Relaxin |
| | | | | | family peptide receptor 2) |
| 644 | HLA-A*29:02_GYWGVRLKY | 538 | KCNV2 | ENSG00000168263 | Potassium voltage-gated channel subfamily V |
| | | | | | member 2 (Voltage-gated potassium channel |
| | | | | | subunit Kv8.2) |
| 645 | HLA-B*18:01_LEEKMIAAY | 539 | RNF17 | ENSG00000132972 | RING finger protein 17 (Tudor domain- |
| | | | | | containing protein 4) |
| 646 | HLA-A*02:07_SLDEALQRV | 540 | RNF17 | ENSG00000132972 | RING finger protein 17 (Tudor domain- |
| | | | | | containing protein 4) |
| 647 | HLA-A*29:02_AVWPLELAY | 541 | UBP41 | ENSG00000161133 | Putative ubiquitin carboxyl-terminal hydrolase 41 |
| | | | | | (EC 3.4.19.12)(Deubiquitinating enzyme 41) |
| | | | | | (Ubiquitin thioesterase 41)(Ubiquitin-specific- |
| | | | | | processing protease 41) |
| 648 | HLA-B*46:01_LAFGGHIAF | 458 | S6A18 | ENSG00000164363 | Sodium-dependent neutral amino acid transporter |
| | | | | | B(0)AT3 (Sodium-and chloride-dependent |
| | | | | | transporter XTRP2)(Solute carrier family 6 |
| | | | | | member 18)(System B(0) neutral amino acid |
| | | | | | transporter AT3) |
| 649 | HLA-A*01:01_DTELGSSEY | 542 | PERL | ENSG00000167419 | Lactoperoxidase (LPO)(EC 1.11.1.7)(Salivary |
| | | | | | peroxidase)(SPO) |
| 650 | HLA-A*02:07_GLPDIMKPIKL | 543 | GP139 | ENSG00000180269 | Probable G-protein coupled receptor 139 (G(q)- |
| | | | | | coupled orphan receptor GPRg1)(G-protein- |
| | | | | | coupled receptor PGR3) |
| 651 | HLA-B*51:01_LPANILTVI | 544 | GP139 | ENSG00000180269 | Probable G-protein coupled receptor 139 (G(q)- |
| | | | | | coupled orphan receptor GPRg1)(G-protein- |
| | | | | | coupled receptor PGR3) |
| 652 | HLA-A*02:01_SLAETPASA | 545 | GALP | ENSG00000197487 | Galanin-like peptide |
| 653 | HLA-A*30:02_SIQQLVPEY | 546 | C144L | ENSG00000205212 | Putative coiled-coil domain-containing protein |
| | | | | | 144 N-terminal-like |
| 654 | HLA-B*18:01_DELEKQIVY | 547 | E9PBZ7 | ENSG00000242715 | Coiled-coil domain-containing protein 169 |
| 655 | HLA-B*51:01_FPLPLAREV | 548 | PERL | ENSG00000167419 | Lactoperoxidase (LPO)(EC 1.11.1.7)(Salivary |
| | | | | | peroxidase)(SPO) |
| 656 | HLA-A*11:01_SSMALPSPHK | 549 | FOXR1 | ENSG00000176302 | Forkhead box protein R1 (Forkhead box protein |
| | | | | | N5) |
| 657 | HLA-A*26:01_DVAEAIAFF | 550 | A0A1B0GVHE | ENSG00000226792 | Long intergenic non-protein coding RNA 371 |
| 658 | HLA-A*26:01_DTAVLITRY | 551 | ATS20 | ENSG00000173157 | A disintegrin and metalloproteinase with |
| | | | | | thrombospondin motifs 20 (ADAM-TS 20) |
| | | | | | (ADAM-TS20)(ADAMTS-20)(EC 3.4.24.-) |
| 659 | HLA-C*04:01_NFDGATTL | 552 | ATS20 | ENSG00000173157 | A disintegrin and metalloproteinase with |
| | | | | | thrombospondin motifs 20 (ADAM-TS 20) |
| | | | | | (ADAM-TS20)(ADAMTS-20)(EC 3.4.24.-) |
| 660 | HLA-A*03:01_STNLPLTQK | 553 | ATS20 | ENSG00000173157 | A disintegrin and metalloproteinase with |
| | | | | | thrombospondin motifs 20 (ADAM-TS 20) |
| | | | | | (ADAM-TS20)(ADAMTS-20)(EC 3.4.24.-) |
| 661 | HLA-A*11:01_STNLPLTQK | 553 | ATS20 | ENSG00000173157 | A disintegrin and metalloproteinase with |
| | | | | | thrombospondin motifs 20 (ADAM-TS 20) |
| | | | | | (ADAM-TS20)(ADAMTS-20)(EC 3.4.24.-) |
| 662 | HLA-A*24:02_NYFIDPVTI | 554 | TRI48 | ENSG00000150244 | Tripartite motif-containing protein 48 (RING |
| | | | | | finger protein 101) |
| 663 | HLA-B*51:01_DPITFSFI | 555 | UROL1 | ENSG00000177398 | Uromodulin-like 1 (Olfactorin) |
| 664 | HLA-A*26:01_EVISVQVQDV | 556 | UROL1 | ENSG00000177398 | Uromodulin-like 1 (Olfactorin) |
| 665 | HLA-A*02:01_SLFESLEYL | 557 | ZFP42 | ENSG00000179059 | Zinc finger protein 42 homolog (Zfp-42) |
| | | | | | (Reduced expression protein 1)(REX-1)(hREX- |
| | | | | | 1)(Zinc finger protein 754) |
| 666 | HLA-B*46:01_FLITQATAY | 321 | NBPF6 | ENSG00000186086 | Neuroblastoma breakpoint family member 6 |
| 667 | HLA-A*03:01_RTFPITGLRY | 444 | DYTN | ENSG00000232125 | Dystrotelin |
| 668 | HLA-C*02:02_AELQASLSKY | 558 | TDRD1 | ENSG00000095627 | Tudor domain-containing protein 1 (Cancer/testis |
| | | | | | antigen 41.1)(CT41.1) |
| 669 | HLA-A*29:02_IFSDQETFY | 559 | PRD14 | ENSG00000147596 | PR domain zinc finger protein 14 (EC 2.1.1.-) |
| | | | | | (PR domain-containing protein 14) |
| 670 | HLA-A*03:01_AVYNSPQFKK | 560 | FBX39 | ENSG00000177294 | F-box only protein 39 |
| 671 | HLA-A*11:01_AVYNSPQFKK | 560 | FBX39 | ENSG00000177294 | F-box only protein 39 |
| 672 | HLA-A*11:01_AVYNSPQFK | 561 | FBX39 | ENSG00000177294 | F-box only protein 39 |
| 673 | HLA-B*51:01_SAYGNATSV | 562 | ZPLD1 | ENSG00000170044 | Zona pellucida-like domain-containing protein 1 |
| | | | | | (ZP domain-containing protein 1) |
| 674 | HLA-A*26:01_FTVDSNQQTY | 563 | SYCY2 | ENSG00000244476 | Syncytin-2 (Endogenous retrovirus group FRD |
| | | | | | member 1)(Envelope polyprotein)(HERV-FRD) |
| | | | | | (HERV-FRD 6p24.1 provirus ancestral Env |
| | | | | | polyprotein)[Cleaved into: Surface protein (SU); |
| | | | | | Transmembrane protein (TM)] |
| 675 | HLA-A*30:02_AVAPHHSGVY | 564 | NDST4 | ENSG00000138653 | Bifunctional heparan sulfate N-deacetylase/N- |
| | | | | | sulfotransferase 4 (EC 2.8.2.8)(Glucosaminyl N- |
| | | | | | deacetylase/N-sulfotransferase 4)(NDST-4)(N- |
| | | | | | heparan sulfate sulfotransferase 4)(N-HSST 4) |
| | | | | | [Includes: Heparan sulfate N-deacetylase 4 (EC |
| | | | | | 3.-.-.-); Heparan sulfate N-sulfotransferase 4 (EC |
| | | | | | 2.8.2.-)] |
| 676 | HLA-A*11:01_SVSIIGHIK | 565 | NDST4 | ENSG00000138653 | Bifunctional heparan sulfate N-deacetylase/N- |
| | | | | | sulfotransferase 4 (EC 2.8.2.8)(Glucosaminyl N- |
| | | | | | deacetylase/N-sulfotransferase 4)(NDST-4)(N- |
| | | | | | heparan sulfate sulfotransferase 4)(N-HSST 4) |
| | | | | | [Includes: Heparan sulfate N-deacetylase 4 (EC |
| | | | | | 3.-.-.-); Heparan sulfate N-sulfotransferase 4 (EC |
| | | | | | 2.8.2.-)] |
| 677 | HLA-A*31:01_QSFPPKVNR | 566 | NALP9 | ENSG00000185792 | NACHT, LRR and PYD domains-containing |
| | | | | | protein 9 (Nucleotide-binding oligomerization |
| | | | | | domain protein 6)(PYRIN and NACHT- |
| | | | | | containing protein 12) |
| 678 | HLA-A*02:01_FIHEDLNTV | 567 | RNS10 | ENSG00000182545 | Inactive ribonuclease-like protein 10 |
| 679 | HLA-A*29:02_NFFEEVFIY | 568 | NALP9 | ENSG00000185792 | NACHT, LRR and PYD domains-containing |
| | | | | | protein 9 (Nucleotide-binding oligomerization |
| | | | | | domain protein 6)(PYRIN and NACHT- |
| | | | | | containing protein 12) |
| 680 | HLA-B*44:02_EEMQIQKSQW | 569 | NTM2G | ENSG00000188152 | NUT family member 2G |
| 681 | HLA-B*44:03_EEMQIQKSQW | 569 | NTM2G | ENSG00000188152 | NUT family member 2G |
| 682 | HLA-A*01:01_TSDPGLLSY | 570 | NTM2G | ENSG00000188152 | NUT family member 2G |
| 683 | HLA-B*18:01_EESVLVGY | 571 | TDRD1 | ENSG00000095627 | Tudor domain-containing protein 1 (Cancer/testis |
| | | | | | antigen 41.1)(CT41.1) |
| 684 | HLA-B*51:01_DAHNTHVGI | 572 | WNT9B | ENSG00000158955 | Protein Wnt-9b (Protein Wnt-14b)(Protein Wnt- |
| | | | | | 15) |
| 685 | HLA-A*29:02_GFKETAFLY | 573 | WNT9B | ENSG00000158955 | Protein Wnt-9b (Protein Wnt-14b)(Protein Wnt- |
| | | | | | 15) |
| 686 | HLA-A*24:02_VYMEDSPSF | 574 | WNT9B | ENSG00000158955 | Protein Wnt-9b (Protein Wnt-14b)(Protein Wnt- |
| | | | | | 15) |
| 687 | HLA-A*11:01_AVAAKMEVK | 575 | SG1D1 | ENSG00000168515 | Secretoglobin family 1D member 1 (Lipophilin- |
| | | | | | A) |
| 688 | HLA-A*29:02_AFLKMIYSY | 576 | GPC6A | ENSG00000173612 | G-protein coupled receptor family C group 6 |
| | | | | | member A (hGPRC6A)(G-protein coupled |
| | | | | | receptor GPCR33)(hGPCR33) |
| 689 | HLA-B*18:01_NEAKFITF | 577 | GPC6A | ENSG00000173612 | G-protein coupled receptor family C group 6 |
| | | | | | member A (hGPRC6A)(G-protein coupled |
| | | | | | receptor GPCR33)(hGPCR33) |
| 690 | HLA-B*51:01_LPKLPKPYI | 578 | PSG1 | ENSG00000231924 | Pregnancy-specific beta-1-glycoprotein 1 (PS- |
| | | | | | beta-G-1)(PSBG-1)(Pregnancy-specific |
| | | | | | glycoprotein 1)(CD66 antigen-like family |
| | | | | | member F)(Fetal liver non-specific cross-reactive |
| | | | | | antigen 1/2)(FL-NCA-1/2)(PSG95)(Pregnancy- |
| | | | | | specific beta-1 glycoprotein C/D)(PS-beta-C/D) |
| | | | | | (CD antigen CD661) |
| 691 | HLA-B*51:01_LPTTAQVTI | 579 | PSG1 | ENSG00000231924 | Pregnancy-specific beta-1-glycoprotein 1 (PS- |
| | | | | | beta-G-1)(PSBG-1)(Pregnancy-specific |
| | | | | | glycoprotein 1)(CD66 antigen-like family |
| | | | | | member F)(Fetal liver non-specific cross-reactive |
| | | | | | antigen 1/2)(FL-NCA-1/2)(PSG95)(Pregnancy- |
| | | | | | specific beta-1 glycoprotein C/D)(PS-beta-C/D) |
| | | | | | (CD antigen CD66f) |
| 692 | HLA-B*51:01_LPYYSTSII | 580 | ADAM7 | ENSG00000069206 | Disintegrin and metalloproteinase domain- |
| | | | | | containing protein 7 (ADAM 7)(Sperm |
| | | | | | maturation-related glycoprotein GP-83) |
| 693 | HLA-B*51:01_LPYYSTSI | 581 | ADAM7 | ENSG00000069206 | Disintegrin and metalloproteinase domain- |
| | | | | | containing protein 7 (ADAM 7)(Sperm |
| | | | | | maturation-related glycoprotein GP-83) |
| 694 | HLA-A*11:01_VTLAKPVNK | 582 | RBM46 | ENSG00000151962 | Probable RNA-binding protein 46 (Cancer/testis |
| | | | | | antigen 68)(CT68)(RNA-binding motif protein |
| | | | | | 46) |
| 695 | HLA-A*11:01_STEPGISNIK | 583 | CT55 | ENSG00000169551 | Cancer/testis antigen 55 (Tumor antigen BJ- |
| | | | | | HCC-20) |
| 696 | HLA-A*03:01_VVTGNVPLK | 453 | CT55 | ENSG00000169551 | Cancer/testis antigen 55 (Tumor antigen BJ- |
| | | | | | HCC-20) |
| 697 | HLA-A*30:02_DLNDVTHVY | 584 | DDX53 | ENSG00000184735 | Probable ATP-dependent RNA helicase DDX53 |
| | | | | | (EC 3.6.4.13)(Cancer-associated gene protein) |
| | | | | | (Cancer/testis antigen 26)(CT26)(DEAD box |
| | | | | | protein 53)(DEAD box protein CAGE) |
| 698 | HLA-A*31:01_RVQVWFQNR | 367 | ESX1 | ENSG00000123576 | Homeobox protein ESX1 (Extraembryonic, |
| | | | | | spermatogenesis, homeobox 1)[Cleaved into: |
| | | | | | Homeobox protein ESX1-N; Homeobox protein |
| | | | | | ESX1-C] |
| 699 | HLA-A*03:01_KLFIPQITTK | 585 | PSG8 | ENSG00000124467 | Pregnancy-specific beta-1-glycoprotein 8 (PS- |
| | | | | | beta-G-8)(PSBG-8)(Pregnancy-specific |
| | | | | | glycoprotein 8) |
| 700 | HLA-B*51:01_LPKLPKPYI | 578 | PSG8 | ENSG00000124467 | Pregnancy-specific beta-1-glycoprotein 8 (PS- |
| | | | | | beta-G-8)(PSBG-8)(Pregnancy-specific |
| | | | | | glycoprotein 8) |
| 701 | HLA-B*51:01_YPKLPKPYI | 586 | PSG8 | ENSG00000124467 | Pregnancy-specific beta-1-glycoprotein 8 (PS- |
| | | | | | beta-G-8)(PSBG-8)(Pregnancy-specific |
| | | | | | glycoprotein 8) |
| 702 | HLA-B*35:01_LPLVTVVY | 587 | S7A13 | ENSG00000164893 | Solute carrier family 7 member 13 (Sodium- |
| | | | | | independent aspartate/glutamate transporter 1) |
| | | | | | (X-amino acid transporter 2) |
| 703 | HLA-A*24:02_NYGVLHVTF | 588 | NAL11 | ENSG00000179873 | NACHT, LRR and PYD domains-containing |
| | | | | | protein 11 (Nucleotide-binding oligomerization |
| | | | | | domain protein 17)(PAAD-and NACHT domain- |
| | | | | | containing protein 10)(PYRIN-containing |
| | | | | | APAF1-like protein 6) |
| 704 | HLA-B*18:01_DETEIRSFF | 589 | DAZL | ENSG00000092345 | Deleted in azoospermia-like (DAZ homolog) |
| | | | | | (DAZ-like autosomal)(Deleted in azoospermia- |
| | | | | | like 1)(SPGY-like-autosomal) |
| 705 | HLA-B*18:01_DETEIRSF | 590 | DAZL | ENSG00000092345 | Deleted in azoospermia-like (DAZ homolog) |
| | | | | | (DAZ-like autosomal)(Deleted in azoospermia- |
| | | | | | like 1)(SPGY-like-autosomal) |
| 706 | HLA-B*35:01_SPVQVITGY | 591 | DAZL | ENSG00000092345 | Deleted in azoospermia-like (DAZ homolog) |
| | | | | | (DAZ-like autosomal)(Deleted in azoospermia- |
| | | | | | like 1)(SPGY-like-autosomal) |
| 707 | HLA-B*51:01_DAYIPGGPLTV | 592 | OVOL3 | ENSG00000105261 | Putative transcription factor ovo-like protein 3 |
| 708 | HLA-A*30:02_KVHGQPASYAY | 593 | OVOL3 | ENSG00000105261 | Putative transcription factor ovo-like protein 3 |
| 709 | HLA-A*30:02_KVHGQPASY | 594 | OVOL3 | ENSG00000105261 | Putative transcription factor ovo-like protein 3 |
| 710 | HLA-B*35:01_SPAPSLESY | 595 | MSGN1 | ENSG00000151379 | Mesogenin-1 (Paraxial mesoderm-specific |
| | | | | | mesogeninl)(pMesogeninl)(pMsgn1) |
| 711 | HLA-A*02:01_TLADALHTL | 596 | MSGN1 | ENSG00000151379 | Mesogenin-1 (Paraxial mesoderm-specific |
| | | | | | mesogeninl)(pMesogeninl)(pMsgn1) |
| 712 | HLA-B*51:01_LPAVQAPVI | 597 | TEKT5 | ENSG00000153060 | Tektin-5 |
| 713 | HLA-B*08:01_YSAARAVSL | 598 | NPBW1 | ENSG00000183729 | Neuropeptides B/W receptor type 1 (G-protein |
| | | | | | coupled receptor 7) |
| 714 | HLA-A*24:02_VYFGHDSELF | 599 | NALP9 | ENSG00000185792 | NACHT, LRR and PYD domains-containing |
| | | | | | protein 9 (Nucleotide-binding oligomerization |
| | | | | | domain protein 6)(PYRIN and NACHT- |
| | | | | | containing protein 12) |
| 715 | HLA-B*51:01_IGYVTPDI | 600 | SYCY2 | ENSG00000244476 | Syncytin-2 (Endogenous retrovirus group FRD |
| | | | | | member 1)(Envelope polyprotein)(HERV-FRD) |
| | | | | | (HERV-FRD 6p24.1 provirus ancestral Env |
| | | | | | polyprotein)[Cleaved into: Surface protein (SU); |
| | | | | | Transmembrane protein (TM)] |
| 716 | HLA-B*51:01_LPLQFLVV | 601 | WFD13 | ENSG00000168634 | WAP four-disulfide core domain protein 13 |
| 717 | HLA-B*51:01_LPPTSSISI | 602 | AR13A | ENSG00000174225 | ADP-ribosylation factor-like protein 13A |
| 718 | HLA-A*24:02_PYPDVTFTL | 603 | ACHA9 | ENSG00000174343 | Neuronal acetylcholine receptor subunit alpha-9 |
| | | | | | (Nicotinic acetylcholine receptor subunit alpha-9) |
| | | | | | (NACHR alpha-9) |
| 719 | HLA-B*44:03_GEYPDYQQW | 604 | CRGB | ENSG00000182187 | Gamma-crystallin B (Gamma-B-crystallin) |
| | | | | | (Gamma-crystallin 1-2) |
| 720 | HLA-C*02:02_GEYPDYQQW | 604 | CRGB | ENSG00000182187 | Gamma-crystallin B (Gamma-B-crystallin) |
| | | | | | (Gamma-criystallin 1-2) |
| 721 | HLA-B*35:01_MPVPGQHSM | 605 | AMELX | ENSG00000125363 | Amelogenin, X isoform |
| 722 | HLA-C*16:01_AAVQRAAEL | 606 | TF2LX | ENSG00000153779 | Homeobox protein TGIF2LX (TGF-beta-induced |
| | | | | | transcription factor 2-like protein)(TUB- |
| | | | | | induced factor 2-like protein, X-linked)(TGIF- |
| | | | | | like on the X) |
| 723 | HLA-A*29:02_AIFQGYFAY | 607 | S7A13 | ENSG00000164893 | Solute carrier family 7 member 13 (Sodium- |
| | | | | | independent aspartate/glutamate transporter 1) |
| | | | | | (X-amino acid transporter 2) |
| 724 | HLA-A*11:01_AQFSSSAIQK | 608 | SOX14 | ENSG00000168875 | Transcription factor SOX-14 (Protein SOX-28) |
| 725 | HLA-A*29:02_AFAPTFLVY | 609 | S22AO | ENSG00000197658 | Solute carrier family 22 member 24 |
| 726 | HLA-B*51:01_DAVRIKTSI | 610 | S22AO | ENSG00000197658 | Solute carrier family 22 member 24 |
| 727 | HLA-B*51:01_FPILAVPVI | 611 | S22AO | ENSG00000197658 | Solute carrier family 22 member 24 |
| 728 | HLA-C*16:01_SASVHHNEL | 612 | S22AO | ENSG00000197658 | Solute carrier family 22 member 24 |
| 729 | HLA-A*11:01_SVSGLVLSH | 613 | S22AO | ENSG00000197658 | Solute carrier family 22 member 24 |
| 730 | HLA-B*35:01_HPAVTPDAY | 614 | AP2D | ENSG00000008197 | Transcription factor AP-2-delta (AP2-delta) |
| | | | | | (Activating enhancer-binding protein 2-delta) |
| | | | | | (Transcription factor AP-2-beta-like 1) |
| 731 | HLA-B*35:01_SVANSTVAY | 615 | AP2D | ENSG00000008197 | Transcription factor AP-2-delta (AP2-delta) |
| | | | | | (Activating enhancer-binding protein 2-delta) |
| | | | | | (Transcription factor AP-2-beta-like 1) |
| 732 | HLA-A*01:01_YSSSSPLTY | 616 | AP2D | ENSG00000008197 | Transcription factor AP-2-delta (AP2-delta) |
| | | | | | (Activating enhancer-binding protein 2-delta) |
| | | | | | (Transcription factor AP-2-beta-like 1) |
| 733 | HLA-B*51:01_DAPPAILTF | 617 | DDX4 | ENSG00000152670 | Probable ATP-dependent RNA helicase DDX4 |
| | | | | | (EC 3.6.4.13)(DEAD box protein 4)(Vasa |
| | | | | | homolog) |
| 734 | HLA-B*18:01_EEIAFSTY | 618 | DDX4 | ENSG00000152670 | Probable ATP-dependent RNA helicase DDX4 |
| | | | | | (EC 3.6.4.13)(DEAD box protein 4)(Vasa |
| | | | | | homolog) |
| 735 | HLA-A*26:01_EINPHMSSY | 619 | DDX4 | ENSG00000152670 | Probable ATP-dependent RNA helicase DDX4 |
| | | | | | (EC 3.6.4.13)(DEAD box protein 4)(Vasa |
| | | | | | homolog) |
| 736 | HLA-A*11:01_SSYVPIFEK | 620 | DDX4 | ENSG00000152670 | Probable ATP-dependent RNA helicase DDX4 |
| | | | | | (EC 3.6.4.13)(DEAD box protein 4)(Vasa |
| | | | | | homolog) |
| 737 | HLA-A*11:01_STIDEYVHR | 621 | DDX4 | ENSG00000152670 | Probable ATP-dependent RNA helicase DDX4 |
| | | | | | (EC 3.6.4.13)(DEAD box protein 4)(Vasa |
| | | | | | homolog) |
| 738 | HLA-A*11:01_STMGGFGVGK | 622 | DDX4 | ENSG00000152670 | Probable ATP-dependent RNA helicase DDX4 |
| | | | | | (EC 3.6.4.13)(DEAD box protein 4)(Vasa |
| | | | | | homolog) |
| 739 | HLA-A*02:07_TIDEYVHRI | 623 | DDX4 | ENSG00000152670 | Probable ATP-dependent RNA helicase DDX4 |
| | | | | | (EC 3.6.4.13)(DEAD box protein 4)(Vasa |
| | | | | | homolog) |
| 740 | HLA-A*30:02_TLNNNIAKAGY | 624 | DDX4 | ENSG00000152670 | Probable ATP-dependent RNA helicase DDX4 |
| | | | | | (EC 3.6.4.13)(DEAD box protein 4)(Vasa |
| | | | | | homolog) |
| 741 | HLA-A*11:01_AISITPVHK | 625 | CT55 | ENSG00000169551 | Cancer/testis antigen 55 (Tumor antigen BJ- |
| | | | | | HCC-20) |
| 742 | HLA-B*44:03_AESPLEVPQSF | 626 | MAGBG | ENSG00000189023 | Melanoma-associated antigen B16 (MAGE-B16 |
| | | | | | antigen) |
| 743 | HLA-A*02:07_ALDQKVAFL | 627 | MAGBG | ENSG00000189023 | Melanoma-associated antigen B16 (MAGE-B16 |
| | | | | | antigen) |
| 744 | HLA-A*26:01_EVLNLTGVY | 628 | MAGBG | ENSG00000189023 | Melanoma-associated antigen B16 (MAGE-B16 |
| | | | | | antigen) |
| 745 | HLA-A*29:02_LFIKLGLTY | 629 | MAGBG | ENSG00000189023 | Melanoma-associated antigen B16 (MAGE-B16 |
| | | | | | antigen) |
| 746 | HLA-A*29:02_SLAEQILAKY | 630 | FOXR2 | ENSG00000189299 | Forkhead box protein R2 (Forkhead box protein |
| | | | | | N6) |
| 747 | HLA-A*11:01_SSSSEQSPLQK | 631 | FOXR2 | ENSG00000189299 | Forkhead box protein R2 (Forkhead box protein |
| | | | | | N6) |
| 748 | HLA-B*51:01_LPNTSIHGI | 632 | NMUR2 | ENSG00000132911 | Neuromedin-U receptor 2 (NMU-R2)(G-protein |
| | | | | | coupled receptor FM-4)(G-protein coupled |
| | | | | | receptor TGR-1) |
| 749 | HLA-B*51:01_YPNSPVQVI | 633 | DAZL | ENSG00000092345 | Deleted in azoospermia-like (DAZ homolog) |
| | | | | | (DAZ-like autosomal)(Deleted in azoospermia- |
| | | | | | like 1)(SPGY-like-autosomal) |
| 750 | HLA-B*35:01_HAAGFGPEL | 634 | MBOA4 | ENSG00000177669 | Ghrelin O-acyltransferase (EC 2.3.1.-) |
| | | | | | (Membrane-bound O-acyltransferase domain- |
| | | | | | containing protein 4)(O-acyltransferase domain- |
| | | | | | containing protein 4) |
| 751 | HLA-A*29:02_GVLILLVRY | 635 | ADAM7 | ENSG00000069206 | Disintegrin and metalloproteinase domain- |
| | | | | | containing protein 7 (ADAM 7)(Sperm |
| | | | | | maturation-related glycoprotein GP-83) |
| 752 | HLA-A*02:01_GLYGINEDIFL | 636 | LDH6A | ENSG00000166800 | L-lactate dehydrogenase A-like 6A (EC 1.1.1.27) |
| 753 | HLA-B*46:01_LMIPNITQY | 637 | LDH6A | ENSG00000166800 | L-lactate dehydrogenase A-like 6A (EC 1.1.1.27) |
| 754 | HLA-A*11:01_SVADLTESILK | 638 | LDH6A | ENSG00000166800 | L-lactate dehydrogenase A-like 6A (EC 1.1.1.27) |
| 755 | HLA-A*02:01_TLWEIQKELKL | 639 | LDH6A | ENSG00000166800 | L-lactate dehydrogenase A-like 6A (EC 1.1.1.27) |
| 756 | HLA-B*35:01_MPHEVTHSM | 640 | V9GZ31 | ENSG00000177414 | Ubiquitin-conjugating enzyme E2 U (Fragment) |
| 757 | HLA-A*03:01_ATFQTTLPTLK | 641 | GDPD4 | ENSG00000178795 | Glycerophosphodiester phosphodiesterase |
| | | | | | domain-containing protein 4 (EC 3.1.-.-) |
| | | | | | (Glycerophosphodiester phosphodiesterase 6) |
| | | | | | (UgPQ) |
| 758 | HLA-A*11:01_ATFQTTLPTLK | 641 | GDPD4 | ENSG00000178795 | Glycerophosphodiester phosphodiesterase |
| | | | | | domain-containing protein 4 (EC 3.1.-.-) |
| | | | | | (Glycerophosphodiester phosphodiesterase 6) |
| | | | | | (UgPQ) |
| 759 | HLA-B*18:01_LETDIHLSY | 642 | GDPD4 | ENSG00000178795 | Glycerophosphodiester phosphodiesterase |
| | | | | | domain-containing protein 4 (EC 3.1.-.-) |
| | | | | | (Glycerophosphodiester phosphodiesterase 6) |
| | | | | | (UgPQ) |
| 760 | HLA-A*02:07_VLDQNRSTL | 643 | PERL | ENSG00000167419 | Lactoperoxidase (LPO)(EC 1.11.1.7)(Salivary |
| | | | | | peroxidase)(SPO) |
| 761 | HLA-B*44:03_QEGSSGMELSW | 644 | TEX19 | ENSG00000182459 | Testis-expressed protein 19 |
| 762 | HLA-C*16:01_IEAELHISY | 254 | SYCY2 | ENSG00000244476 | Syncytin-2 (Endogenous retrovirus group FRD |
| | | | | | member 1)(Envelope polyprotein)(HERV-FRD) |
| | | | | | (HERV-FRD 6p24.1 provirus ancestral Env |
| | | | | | polyprotein)[Cleaved into: Surface protein (SU); |
| | | | | | Transmembrane protein (TM)] |
| 763 | HLA-B*51:01_VPLSTVNRV | 645 | TIFAB | ENSG00000255833 | TRAF-interacting protein with FHA domain- |
| | | | | | containing protein B (TWA-like protein) |
| 764 | HLA-B*35:01_AAAAAGLAY | 646 | BHE23 | ENSG00000125533 | Class E basic helix-loop-helix protein 23 |
| | | | | | (bHLHe23)(Class B basic helix-loop-helix |
| | | | | | protein 4)(bHLHb4) |
| 765 | HLA-B*51:01_IPYAHSPSV | 647 | BHE23 | ENSG0000012553 3 | Class E basic helix-loop-helix protein 23 |
| | | | | | (bHLHe23)(Class B basic helix-loop-helix |
| | | | | | protein 4)(bHLHb4) |
| 766 | HLA-B*18:01_EEFNVLEM | 648 | FATE1 | ENSG00000147378 | Fetal and adult testis-expressed transcript protein |
| | | | | | (Cancer/testis antigen 43)(CT43)(Tumor antigen |
| | | | | | BJ-HCC-2) |
| 767 | HLA-B*51:01_LPPGGIPGI | 649 | ZFP42 | ENSG00000179059 | Zinc finger protein 42 homolog (Zfp-42) |
| | | | | | (Reduced expression protein 1)(REX-1)(hREX- |
| | | | | | 1)(Zinc finger protein 754) |
| 768 | HLA-C*02:02_KEADPTGHSY | 650 | MAGA1 | ENSG00000198681 | Melanoma-associated antigen 1 (Antigen MZ2-E) |
| | | | | | (Cancer/testis antigen 1.1)(CT1.1)(MAGE-1 |
| | | | | | antigen) |
| 769 | HLA-A*01:01_HTEDKPYKY | 462 | ZNF99 | ENSG00000213973 | Zinc finger protein 99 |
| 770 | HLA-A*02:01_ILYDLKIAL | 651 | ZNF99 | ENSG00000213973 | Zinc finger protein 99 |
| 771 | HLA-A*03:01_KVFNNSSTLMK | 652 | ZNF99 | ENSG00000213973 | Zinc finger protein 99 |
| 772 | HLA-C*02:02_AEQQPQPQF | 653 | MORC1 | ENSG00000114487 | MORC family CW-type zinc finger protein 1 |
| | | | | | (Cancer/testis antigen 33)(CT33) |
| 773 | HLA-B51:01_IPLGTMSTI | 654 | MORC1 | ENSG00000114487 | MORC family CW-type zinc finger protein 1 |
| | | | | | (Cancer/testis antigen 33)(CT33) |
| 774 | HLA-B*18:01_QEFLNVQEY | 655 | MORC1 | ENSG00000114487 | MORC family CW-type zinc finger protein 1 |
| | | | | | (Cancer/testis antigen 33)(CT33) |
| 775 | HLA-B*44:03_QEFLNVQEY | 655 | MORC1 | ENSG00000114487 | MORC family CW-type zinc finger protein 1 |
| | | | | | (Cancer/testis antigen 33)(CT33) |
| 776 | HLA-B*18:01_TEAELMQQF | 656 | MORC1 | ENSG00000114487 | MORC family CW-type zinc finger protein 1 |
| | | | | | (Cancer/testis antigen 33)(CT33) |
| 777 | HLA-B*44:03_TEAELMQQF | 656 | MORC1 | ENSG00000114487 | MORC family CW-type zinc finger protein 1 |
| | | | | | (Cancer/testis antigen 33)(CT33) |
| 778 | HLA-C*05:01_VTDDPQKF | 657 | MORC1 | ENSG00000114487 | MORC family CW-type zinc finger protein 1 |
| | | | | | (Cancer/testis antigen 33)(CT33) |
| 779 | HLA-A*29:02_SLPDKVFIKY | 658 | RXFP2 | ENSG00000133105 | Relaxin receptor 2 (G-protein coupled receptor |
| | | | | | 106)(G-protein coupled receptor affecting |
| | | | | | testicular descent)(Leucine-rich repeat- |
| | | | | | containing G-protein coupled receptor 8)(Relaxin |
| | | | | | family peptide receptor 2) |
| 780 | HLA-A*26:01_EVAERGTAY | 659 | MMP20 | ENSG00000137674 | Matrix metalloproteinase-20 (MMP-20)(EC |
| | | | | | 3.4.24.-)(Enamel metalloproteinase) |
| | | | | | (Enamelysin) |
| 781 | HLA-A*29:02_FFSGPKTYKY | 660 | MMP20 | ENSG00000137674 | Matrix metalloproteinase-20 (MMP-20)(EC |
| | | | | | 3.4.24.-)(Enamel metalloproteinase) |
| | | | | | (Enamelysin) |
| 782 | HLA-B*44:03_GEADIMISF | 661 | MMP20 | ENSG00000137674 | Matrix metalloproteinase-20 (MMP-20)(EC |
| | | | | | 3.4.24.-)(Enamel metalloproteinase) |
| | | | | | (Enamelysin) |
| 783 | HLA-C*02:02_GEADIMISF | 661 | MMP20 | ENSG00000137674 | Matrix metalloproteinase-20 (MMP-20)(EC |
| | | | | | 3.4.24.-)(Enamel metalloproteinase) |
| | | | | | (Enamelysin) |
| 784 | HLA-B*35:01_LPASGLAVF | 662 | MMP20 | ENSG00000137674 | Matrix metalloproteinase-20 (MMP-20)(EC |
| | | | | | 3.4.24.-)(Enamel metalloproteinase) |
| | | | | | (Enamelysin) |
| 785 | HLA-A*11:01_SSFDAVTMLGK | 663 | MMP20 | ENSG00000137674 | Matrix metalloproteinase-20 (MMP-20)(EC |
| | | | | | 3.4.24.-)(Enamel metalloproteinase) |
| | | | | | (Enamelysin) |
| 786 | HLA-A*01:01_STDPSALMY | 664 | MMP20 | ENSG00000137674 | Matrix metalloproteinase-20 (MMP-20)(EC |
| | | | | | 3.4.24.-)(Enamel metalloproteinase) |
| | | | | | (Enamelysin) |
| 787 | HLA-A*29:02_YFFSGPKTYKY | 665 | MMP20 | ENSG00000137674 | Matrix metalloproteinase-20 (MMP-20)(EC |
| | | | | | 3.4.24.-)(Enamel metalloproteinase) |
| | | | | | (Enamelysin) |
| 788 | HLA-A*24:02_IYSGNSYYF | 666 | CNTP5 | ENSG00000155052 | Contactin-associated protein-like 5 (Cell |
| | | | | | recognition molecule Caspr5) |
| 789 | HLA-A*33:01_DMQAVETYR | 667 | PDCL2 | ENSG00000163440 | Phosducin-like protein 2 |
| 790 | HLA-A*31:01_ASWARIAAR | 668 | DPPA2 | ENSG00000163530 | Developmental pluripotency-associated protein 2 |
| | | | | | (Pluripotent embryonic stem cell-related gene 1 |
| | | | | | protein) |
| 791 | HLA-B*44:03_KEDNPSGHTY | 669 | MAGB1 | ENSG00000214107 | Melanoma-associated antigen B1 (Cancer/testis |
| | | | | | antigen 3.1)(CT3.1)(DSS-AHC critical interval |
| | | | | | MAGE superfamily 10)(DAM10)(MAGE-Bl |
| | | | | | antigen)(MAGE-XP antigen) |
| 792 | HLA-A*03:01_TVAVTQMNK | 242 | ACTL8 | ENSG00000117148 | Actin-like protein 8 (Cancer/testis antigen 57) |
| | | | | | (CT57) |
| 793 | HLA-A*31:01_AVRGSDTLWYR | 670 | RNF17 | ENSG00000132972 | RING finger protein 17 (Tudor domain-containing protein 4) |
| 794 | HLA-B*08:01_YQKEKNVSI | 671 | I22R2 | ENSG00000164485 | Interleukin-22 receptor subunit alpha-2 (IL-22 |
| | | | | | receptor subunit alpha-2)(IL-22R-alpha-2)(IL- |
| | | | | | 22RA2)(Cytokine receptor class-II member 10) |
| | | | | | (Cytokine receptor family 2 member 10)(CRF2- |
| | | | | | 10)(Cytokine receptor family type 2, soluble 1) |
| | | | | | (CRF2-S1)(Interleukin-22-binding protein)(IL- |
| | | | | | 22BP)(IL22BP)(ZcytoR16) |
| 795 | HLA-C*04:01_FFDSIIAEL | 672 | A0A1B0GVHE | ENSG00000226792 | Long intergenic non-protein coding RNA 371 |
| 796 | HLA-B*27:02_VDQIALPNLK | 673 | DYTN | ENSG00000232125 | Dystrotelin |
| 797 | HLA-A*33:01_DTFRSISTR | 674 | WNT8B | ENSG00000075290 | Protein Wnt-gb |
| 798 | HLA-B*27:02_GRGAIADTF | 675 | WNT8B | ENSG00000075290 | Protein Wnt-8b |
| 799 | HLA-B*44:03_AESEGTKAVL | 676 | H2BWT | ENSG00000123569 | Histone H2B type W-T (H2B histone family |
| | | | | | member W testis-specific) |
| 800 | HLA-C*02:02_AESEGTKAVL | 676 | H2BWT | ENSG00000123569 | Histone H2B type W-T (H2B histone family |
| | | | | | member W testis-specific) |
| 801 | HLA-A*03:01_SLYAIQQQRK | 677 | H2BWT | ENSG00000123569 | Histone H2B type W-T (H2B histone family |
| | | | | | member W testis-specific) |
| 802 | HLA-B*18:01_DEAGMLSYF | 678 | APOL5 | ENSG00000128313 | Apolipoprotein L5 (Apolipoprotein L-V)(ApoL- |
| | | | | | V) |
| 803 | HLA-B*18:01_DEAGMLSY | 679 | APOL5 | ENSG00000128313 | Apolipoprotein L5 (Apolipoprotein L-V)(ApoL- |
| | | | | | V) |
| 804 | HLA-B*44:03_EEEKLFLSY | 680 | APOL5 | ENSG00000128313 | Apolipoprotein L5 (Apolipoprotein L-V)(ApoL- |
| | | | | | V) |
| 805 | HLA-B*08:01_ELLTKTSL | 681 | APOL5 | ENSG00000128313 | Apolipoprotein L5 (Apolipoprotein L-V)(ApoL- |
| | | | | | V) |
| 806 | HLA-A*01:01_HSDEAGMLSY | 682 | APOL5 | ENSG00000128313 | Apolipoprotein L5 (Apolipoprotein L-V)(ApoL- |
| | | | | | V) |
| 807 | HLA-A*31:01_IVTNVLENR | 683 | APOL5 | ENSG00000128313 | Apolipoprotein L5 (Apolipoprotein L-V)(ApoL- |
| | | | | | V) |
| 808 | HLA-A*33:01_IVTNVLENR | 683 | APOL5 | ENSG00000128313 | Apolipoprotein L5 (Apolipoprotein L-V)(ApoL- |
| | | | | | V) |
| 809 | HLA-A*30:02_QGIKDLHAY | 684 | APOL5 | ENSG00000128313 | Apolipoprotein L5 (Apolipoprotein L-V)(ApoL- |
| | | | | | V) |
| 810 | HLA-B*44:03_SEEEKLFLSY | 685 | APOL5 | ENSG00000128313 | Apolipoprotein L5 (Apolipoprotein L-V)(ApoL- |
| | | | | | V) |
| 811 | HLA-B*18:01_SEIEAAGF | 686 | APOL5 | ENSG00000128313 | Apolipoprotein L5 (Apolipoprotein L-V)(ApoL- |
| | | | | | V) |
| 812 | HLA-A*11:01_ASVLIFANK | 687 | K7EM39 | ENSG00000141748 | Putative ADP-ribosylation factor-like protein 5C |
| | | | | | (Fragment) |
| 813 | HLA-B*44:03_EEQSLQKLY | 688 | SPT21 | ENSG00000187144 | Spermatogenesis-associated protein 21 |
| 814 | HLA-A*01:01_QSSERTLSY | 689 | SPT21 | ENSG00000187144 | Spermatogenesis-associated protein 21 |
| 815 | HLA-A*11:01_ITQDLVQEK | 690 | MAGB1 | ENSG00000214107 | Melanoma-associated antigen B1 (Cancer/testis |
| | | | | | antigen 3.1)(CT3.1)(DSS-AHC critical interval |
| | | | | | MAGE superfamily 10)(DAM10)(MAGE-Bi |
| | | | | | antigen)(MAGE-XP antigen) |
| 816 | HLA-A*29:02_FVADSFPFY | 691 | FOXI3 | ENSG00000214336 | Forkhead box protein I3 |
| 817 | HLA-B*18:01_DEGEHLVF | 692 | ADAM7 | ENSG00000069206 | Disintegrin and metalloproteinase domain- |
| | | | | | containing protein 7 (ADAM 7)(Sperm |
| | | | | | maturation-related glycoprotein GP-83) |
| 818 | HLA-A*26:01_EVATAVNTR | 693 | RNF17 | ENSG00000132972 | RING finger protein 17 (Tudor domain-containing protein 4) |
| 819 | HLA-A*02:07_ILPLRFVEL | 694 | F71F1 | ENSG00000135248 | Protein FAM71F1 (Protein FAM137A)(Testis |
| | | | | | development protein NYD-SP18) |
| 820 | HLA-A*02:01_TVTEKIYYL | 695 | F71F1 | ENSG00000135248 | Protein FAM71F1 (Protein FAM137A)(Testis |
| | | | | | development protein NYD-SP18) |
| 821 | HLA-A*26:01_EVTNHNIRLF | 696 | TRI43 | ENSG00000144015 | Tripartite motif-containing protein 43 |
| 822 | HLA-A*24:02_EYQEIFQQL | 697 | TRI43 | ENSG00000144015 | Tripartite motif-containing protein 43 |
| 823 | HLA-A*29:02_LTFPVRPFFY | 698 | TRI43 | ENSG00000144015 | Tripartite motif-containing protein 43 |
| 824 | HLA-B*35:01_MPQPVNPEL | 699 | TRI43 | ENSG00000144015 | Tripartite motif-containing protein 43 |
| 825 | HLA-A*24:02_NYLVDPVTI | 700 | TRI43 | ENSG00000144015 | Tripartite motif-containing protein 43 |
| 826 | HLA-A*11:01_SVSFLNVTK | 701 | TRI43 | ENSG00000144015 | Tripartite motif-containing protein 43 |
| 827 | HLA-B*44:03_GEYPDYQQW | 604 | CRGC | ENSG00000163254 | Gamma-crystallin C (Gamma-C-crystallin) |
| | | | | | (Gamma-crystallin 2-1)(Gamma-crystallin 3) |
| 828 | HLA-C*02:02_GEYPDYQQW | 604 | CRGC | ENSG00000163254 | Gamma-crystallin C (Gamma-C-crystallin) |
| | | | | | (Gamma-crystallin 2-1)(Gamma-crystallin 3) |
| 829 | HLA-B*44:03_EEITQGNTL | 702 | CC049 | ENSG00000163632 | Putative uncharacterized protein C3orf49 |
| 830 | HLA-A*31:01_ITQGNTLLRAR | 703 | CC049 | ENSG00000163632 | Putative uncharacterized protein C3orf49 |
| 831 | HLA-B*35:01_LPEPFKIAY | 704 | CC049 | ENSG00000163632 | Putative uncharacterized protein C3orf49 |
| 832 | HLA-A*02:07_QVDDLIETV | 705 | CC049 | ENSG00000163632 | Putative uncharacterized protein C3orf49 |
| 833 | HLA-A*11:01_VTSLPSGLQK | 706 | CC049 | ENSG00000163632 | Putative uncharacterized protein C3orf49 |
| 834 | HLA-A*29:02_YLPEPFKIAY | 707 | CC049 | ENSG00000163632 | Putative uncharacterized protein C3orf49 |
| 835 | HLA-A*29:02_EVVGVVYVY | 168 | S6A18 | ENSG00000164363 | Sodium-dependent neutral amino acid transporter |
| | | | | | B(0)AT3 (Sodium-and chloride-dependent |
| | | | | | transporter XTRP2)(Solute carrier family 6 |
| | | | | | member 18)(System B(0) neutral amino acid |
| | | | | | transporter AT3) |
| 836 | HLA-B*35:01_TVQGVVTSF | 708 | CT55 | ENSG00000169551 | Cancer/testis antigen 55 (Tumor antigen BJ- |
| | | | | | HCC-20) |
| 837 | HLA-A*11:01_ASLQDILSH | 709 | S22AD | ENSG00000172940 | Solute carrier family 22 member 13 (Organic |
| | | | | | cation transporter-like 3)(ORCTL-3) |
| 838 | HLA-A*01:01_YTESRSFNY | 710 | EP3B | ENSG00000181552 | Epididymal secretoiy protein E3-beta (Human |
| | | | | | epididymis-specific protein 3-beta)(HE3-beta) |
| 839 | HLA-A*02:07_LLDDIMAEV | 711 | TSPY1 | ENSG00000258992 | Testis-specific Y-encoded protein 1 (Cancer/testis |
| | | | | | antigen 78)(CT78) |
| 840 | HLA-A*02:01_SLDEALQRV | 540 | RNF17 | ENSG00000132972 | RING finger protein 17 (Tudor domain- |
| | | | | | containing protein 4) |
| 841 | HLA-B*51:01_DAVEALYKV | 712 | CBPA5 | ENSG00000158525 | Carboxypeptidase A5 (EC 3.4.17.-) |
| 842 | HLA-A*01:01_YLESHGLAY | 713 | CBPA5 | ENSG00000158525 | Carboxypeptidase A5 (EC 3.4.17.-) |
| 843 | HLA-A*02:07_LLDDIMAEV | 711 | C9JPU3 | ENSG00000168757 | Testis-specific Y-encoded protein 2 |
| 844 | HLA-A*30:02_AVQTSYTSY | 714 | UROL1 | ENSG00000177398 | Uromodulin-like 1 (Olfactorin) |
| 845 | HLA-B*44:03_NEVVVSFKW | 715 | LY6L | ENSG00000261667 | Lymphocyte antigen 6L (Lymphocyte antigen 6 |
| | | | | | complex locus protein L) |
| 846 | HLA-A*26:01_DAPPAILTF | 617 | DDX4 | ENSG00000152670 | Probable ATP-dependent RNA helicase DDX4 |
| | | | | | (EC 3.6.4.13)(DEAD box protein 4)(Vasa |
| | | | | | homolog) |
| 847 | HLA-A*30:02_NVNGQTISLY | 716 | LMTD1 | ENSG00000152936 | Lamin tail domain-containing protein 1 |
| | | | | | (Intermediate filament tail domain-containing |
| | | | | | protein 1) |
| 848 | HLA-A*02:01_SLDASPFSV | 717 | LMTD1 | ENSG00000152936 | Lamin tail domain-containing protein 1 |
| | | | | | (Intermediate filament tail domain-containing |
| | | | | | protein 1) |
| 849 | HLA-A*11:01_STATITKEK | 718 | LMTD1 | ENSG00000152936 | Lamin tail domain-containing protein 1 |
| | | | | | (Intermediate filament tail domain-containing |
| | | | | | protein 1) |
| 850 | HLA-A*11:01_STTGQLTSK | 719 | LMTD1 | ENSG00000152936 | Lamin tail domain-containing protein 1 |
| | | | | | (Intermediate filament tail domain-containing |
| | | | | | protein 1) |
| 851 | HLA-B*51:01_IPLTIISI | 720 | NPSR1 | ENSG00000187258 | Neuropeptide S receptor (G-protein coupled |
| | | | | | receptor 154)(G-protein coupled receptor |
| | | | | | PGR14)(G-protein coupled receptor for asthma |
| | | | | | susceptibility) |
| 852 | HLA-B*51:01_LPALEPVI | 721 | PRS48 | ENSG00000189099 | Serine protease 48 (EC 3.4.21.-)(Epidermis- |
| | | | | | specific serine protease-like protein) |
| 853 | HLA-B*44:03_SEGTKVPAW | 722 | CLC6A | ENSG00000205846 | C-type lectin domain family 6 member A (C-type |
| | | | | | lectin superfamily member 10)(Dendritic cell- |
| | | | | | associated C-type lectin 2)(DC-associated C-type |
| | | | | | lectin 2)(Dectin-2) |
| 854 | HLA-A*30:02_YQGSIVHEY | 723 | ADAM7 | ENSG00000069206 | Disintegrin and metalloproteinase domain- |
| | | | | | containing protein 7 (ADAM 7)(Sperm |
| | | | | | maturation-related glycoprotein GP-83) |
| 855 | HLA-B*08:01_HMAHKVNSL | 724 | MROH9 | ENSG00000117501 | Maestro heat-like repeat-containing protein |
| | | | | | family member 9 |
| 856 | HLA-A*02:07_IVDAIYRQL | 725 | MROH9 | ENSG00000117501 | Maestro heat-like repeat-containing protein |
| | | | | | family member 9 |
| 857 | HLA-A*30:02_KVNSLLDAY | 726 | MROH9 | ENSG00000117501 | Maestro heat-like repeat-containing protein |
| | | | | | family member 9 |
| 858 | HLA-B*08:01_NPKTKSSL | 727 | MROH9 | ENSG00000117501 | Maestro heat-like repeat-containing protein |
| | | | | | family member 9 |
| 859 | HLA-B*18:01_SESLAAVF | 728 | NMUR2 | ENSG00000132911 | Neuromedin-U receptor 2 (NMU-R2)(G-protein |
| | | | | | coupled receptor FM-4)(G-protein coupled |
| | | | | | receptor TGR-1) |
| 860 | HLA-B*51:01_IPYLQTVSV | 729 | OX2R | ENSG00000137252 | Orexin receptor type 2 (Ox-2-R)(Ox2-R)(Ox2R) |
| | | | | | (Hypocretin receptor type 2) |
| 861 | HLA-A*02:01_SLADVLVTI | 730 | OX2R | ENSG00000137252 | Orexin receptor type 2 (Ox-2-R)(Ox2-R)(Ox2R) |
| | | | | | (Hypocretin receptor type 2) |
| 862 | HLA-A*26:01_EVITTVYGY | 731 | ZAN | ENSG00000146839 | Zonadhesin |
| 863 | HLA-A*02:01_FLQEVITTV | 732 | ZAN | ENSG00000146839 | Zonadhesin |
| 864 | HLA-A*30:02_GQSPGAALHIY | 733 | ZAN | ENSG00000146839 | Zonadhesin |
| 865 | HLA-B*18:01_LEIEIPTTY | 734 | ZAN | ENSG00000146839 | Zonadhesin |
| 866 | HLA-A*30:02_SGHGVSSRY | 735 | ZAN | ENSG00000146839 | Zonadhesin |
| 867 | HLA-B*18:01_VEVTVPSSY | 736 | ZAN | ENSG00000146839 | Zonadhesin |
| 868 | HLA-A*02:01_GLMAVNQEV | 737 | PERL | ENSG00000167419 | Lactoperoxidase (LPO)(EC 1.11.1.7)(Salivary |
| | | | | | peroxidase)(SPO) |
| 869 | HLA-B*44:03_EEPLSVTASY | 738 | VCX3 | ENSG00000169059 | Variable charge X-linked protein 3 (Variable |
| | | | | | charge protein on X with eight repeats)(VCX-8r) |
| | | | | | (Variably charged protein X-A)(VCX-A) |
| 870 | HLA-B*18:01_EESPFLVAV | 739 | HDGL1 | ENSG00000112273 | Hepatoma-derived growth factor-like protein 1 |
| | | | | | (PWWP domain-containing protein 1) |
| 871 | HLA-B*18:01_DEMGVVGY | 740 | OTOR | ENSG00000125879 | Otoraplin (Fibrocyte-derived protein)(Melanoma |
| | | | | | inhibitory activity-like protein) |
| 872 | HLA-B*44:03_HEAFGGINW | 741 | APOL5 | ENSG00000128313 | Apolipoprotein L5 (Apolipoprotein L-V)(ApoL- |
| | | | | | V) |
| 873 | HLA-A*29:02_FFLSMVNNY | 742 | RXFP2 | ENSG00000133105 | Relaxin receptor 2 (G-protein coupled receptor |
| | | | | | 106)(G-protein coupled receptor affecting |
| | | | | | testicular descent)(Leucine-rich repeat- |
| | | | | | containing G-protein coupled receptor 8)(Relaxin |
| | | | | | family peptide receptor 2) |
| 874 | HLA-A*29:02_IFSQHTFKY | 743 | IFNK | ENSG00000147896 | Interferon kappa (IFN-kappa) |
| 875 | HLA-C*02:02_QEINTKSAF | 744 | GPC6A | ENSG00000173612 | G-protein coupled receptor family C group 6 |
| | | | | | member A (hGPRC6A)(G-protein coupled |
| | | | | | receptor GPCR33)(hGPCR33) |
| 876 | HLA-B*44:03_SESSTILVVRY | 316 | SPNXC | ENSG00000198573 | Sperm protein associated with the nucleus on the |
| | | | | | X chromosome C (Cancer/testis antigen 11.3) |
| | | | | | (CT11.3)(Cancer/testis-associated protein |
| | | | | | CTp11)(Nuclear-associated protein SPAN-Xe) |
| | | | | | (SPANX-C)(SPANX family member C) |
| 877 | HLA-A*24:02_SYLGISAVSEF | 745 | SYCY2 | ENSG00000244476 | Syncytin-2 (Endogenous retrovirus group FRD |
| | | | | | member 1)(Envelope polyprotein)(HERV-FRD) |
| | | | | | (HERV-FRD 6p24.1 provirus ancestral Env |
| | | | | | polyprotein)[Cleaved into: Surface protein (SU); |
| | | | | | Transmembrane protein (TM)] |
| 878 | HLA-A*11:01_ATQRDLIATQK | 746 | LUZP4 | ENSG00000102021 | Leucine zipper protein 4 (Cancer/testis antigen |
| | | | | | 28)(CT-28)(CT28)(Tumor antigen HOM-TES- |
| | | | | | 85) |
| 879 | HLA-B*46:01_AVKKGSTAY | 747 | PSA7L | ENSG00000154611 | Proteasome subunit alpha type-7-like (EC |
| | | | | | 3.4.25.1) |
| 880 | HLA-A*33:01_DARVVINR | 748 | PSA7L | ENSG00000154611 | Proteasome subunit alpha type-7-like (EC |
| | | | | | 3.4.25.1) |
| 881 | HLA-B*51:01_TAYHVSLIV | 749 | PSA7L | ENSG00000154611 | Proteasome subunit alpha type-7-like (EC |
| | | | | | 3.4.25.1) |
| 882 | HLA-B*18:01_VEDPVTVEY | 750 | PSA7L | ENSG00000154611 | Proteasome subunit alpha type-7-like (EC |
| | | | | | 3.4.25.1) |
| 883 | HLA-B*46:01_VVIEQSSSL | 119 | TERT | ENSG00000164362 | Telomerase reverse transcriptase (EC 2.7.7.49) |
| | | | | | (HEST2)(Telomerase catalytic subunit) |
| | | | | | (Telomerase-associated protein 2)(TP2) |
| 884 | HLA-B*44:02_AEARPVPHW | 156 | ACHA9 | ENSG00000174343 | Neuronal acetylcholine receptor subunit alpha-9 |
| | | | | | (Nicotinic acetylcholine receptor subunit alpha-9) |
| | | | | | (NACHR alpha-9) |
| 885 | HLA-C*05:01_NADLQSEFL | 751 | V9GYR9 | ENSG00000225362 | Cancer/testis antigen 62 (Fragment) |
| 886 | HLA-B*35:01_HAEDGTILF | 752 | PIWL1 | ENSG00000125207 | Piwi-like protein 1 (EC 3.1.26.-) |
| 887 | HLA-A*30:02_KTGPSRSSY | 753 | RNF17 | ENSG00000132972 | RING finger protein 17 (Tudor domain- |
| | | | | | containing protein 4) |
| 888 | HLA-A*03:01_AVYNSPQFK | 561 | FBX39 | ENSG00000177294 | F-box only protein 39 |
| 889 | HLA-A*11:01_ASAVQLPEK | 754 | CB091 | ENSG00000205086 | Uncharacterized protein C2orf91 |
| 890 | HLA-A*11:01_ATPSADFLLK | 755 | E9PHT4 | ENSG00000206199 | Protein ANKUB 1 |
| 891 | HLA-A*11:01_AVASAFKEK | 756 | E9PHT4 | ENSG00000206199 | Protein ANKUB 1 |
| 892 | HLA-A*29:02_GYSHPSFFY | 757 | E9PHT4 | ENSG00000206199 | Protein ANKUB 1 |
| 893 | HLA-A*26:01_ETTDIKGLF | 758 | CD051 | ENSG00000237136 | Uncharacterized protein C4orf51 |
| 894 | HLA-A*30:02_AQLGGLSDGY | 759 | HXB1 | ENSG00000120094 | Homeobox protein Hox-B1 (Homeobox protein |
| | | | | | Hox-2I) |
| 895 | HLA-B*44:03_TELEKEFHF | 760 | HXB1 | ENSG00000120094 | Homeobox protein Hox-B1 (Homeobox protein |
| | | | | | Hox-2I) |
| 896 | HLA-B*44:03_EEDVWVIIITLY | 761 | PDCL2 | ENSG00000163440 | Phosducin-like protein 2 |
| 897 | HLA-A*03:01_ALQLVPGSPK | 762 | WED13 | ENSG00000168634 | WAP four-disulfide core domain protein 13 |
| 898 | HLA-B*35:01_MAGASIPAM | 763 | SAGE1 | ENSG00000181433 | Sarcoma antigen 1 (Cancer/testis antigen 14) |
| | | | | | (CT14) |
| 899 | HLA-B*18:01_FEAGTSVTY | 764 | CNTP5 | ENSG00000155052 | Contactin-associated protein-like 5 (Cell |
| | | | | | recognition molecule Caspr5) |
| 900 | HLA-A*30:02_KAFDDIATY | 406 | SSX1 | ENSG00000126752 | Protein SSX1 (Cancer/testis antigen 5.1)(CT5.1) |
| | | | | | (Synovial sarcoma, X breakpoint 1) |
| 901 | HLA-A*02:01_SQDSFIPGV | 765 | CER1 | ENSG00000147869 | Cerbems (Cerbems-related protein)(DAN |
| | | | | | domain family member 4) |
| 902 | HLA-B*51:01_MPYAHGPSV | 766 | OLIG3 | ENSG00000177468 | Oligodendrocyte transcription factor 3 (01ig03) |
| | | | | | (Class B basic helix-loop-helix protein 7) |
| | | | | | (bHLHb7)(Class E basic helix-loop-helix protein |
| | | | | | 20)(bHLHe20) |
| 903 | HLA-B*44:03_SEQDLQQLRL | 767 | OLIG3 | ENSG00000177468 | Oligodendrocyte transcription factor 3 (01ig03) |
| | | | | | (Class B basic helix-loop-helix protein 7) |
| | | | | | (bHLHb7)(Class E basic helix-loop-helix protein |
| | | | | | 20)(bHLHe20) |
| 904 | HLA-C*01:02_SSPLSAASL | 768 | OLIG3 | ENSG00000177468 | Oligodendrocyte transcription factor 3 (01ig03) |
| | | | | | (Class B basic helix-loop-helix protein 7) |
| | | | | | (bHLHb7)(Class E basic helix-loop-helix protein |
| | | | | | 20)(bHLHe20) |
| 905 | HLA-A*11:01_STQGDMMQK | 769 | OLIG3 | ENSG00000177468 | Oligodendrocyte transcription factor 3 (01ig03) |
| | | | | | (Class B basic helix-loop-helix protein 7) |
| | | | | | (bHLHb7)(Class E basic helix-loop-helix protein |
| | | | | | 20)(bHLHe20) |
| 906 | HLA-A*11:01_TTADVALLK | 770 | PRS48 | ENSG00000189099 | Serine protease 48 (EC 3.4.21.-)(Epidermis- |
| | | | | | specific serine protease-like protein) |
| 907 | HLA-B*35:01_NAFKFSSTF | 771 | ZN729 | ENSG00000196350 | Zinc finger protein 729 |
| 908 | HLA-B*44:03_AETDNLDHY | 772 | GLYL3 | ENSG00000203972 | Glycine N-acyltransferase-like protein 3 (EC |
| | | | | | 2.3.1.-) |
| 909 | HLA-A*30:02_TTHIANHSY | 773 | Q5JUY5 | ENSG00000117400 | Thrombopoietin receptor |
| 910 | HLA-A*11:01_ATVEEDFQPFR | 774 | PRD14 | ENSG00000147596 | PR domain zinc finger protein 14 (EC 2.1.1.-) |
| | | | | | (PR domain-containing protein 14) |
| 911 | HLA-B*44:03_AEFPNSFVTL | 775 | ADA18 | ENSG00000168619 | Disintegrin and metalloproteinase domain- |
| | | | | | containing protein 18 (ADAM 18) |
| | | | | | (Transmembrane metalloproteinase-like, |
| | | | | | disintegrin-like, and cysteine-rich protein III) |
| | | | | | (tMDC III) |
| 912 | HLA-A*29:02_FLPQNFLVY | 776 | ADA18 | ENSG00000168619 | Disintegrin and metalloproteinase domain- |
| | | | | | containing protein 18 (ADAM 18) |
| | | | | | (Transmembrane metalloproteinase-like, |
| | | | | | disintegrin-like, and cysteine-rich protein III) |
| | | | | | (tMDC III) |
| 913 | HLA-B*18:01_DEQQIINSF | 777 | PP2D1 | ENSG00000183977 | Protein phosphatase 2C-like domain-containing |
| | | | | | protein 1 |
| 914 | HLA-A*24:02_IYNPENVETF | 778 | PP2D1 | ENSG00000183977 | Protein phosphatase 2C-like domain-containing |
| | | | | | protein 1 |
| 915 | HLA-A*01:01_LSDSNYSKY | 779 | PP2D1 | ENSG00000183977 | Protein phosphatase 2C-like domain-containing |
| | | | | | protein 1 |
| 916 | HLA-A*11:01_STSEPNLTK | 780 | PP2D1 | ENSG00000183977 | Protein phosphatase 2C-like domain-containing |
| | | | | | protein 1 |
| 917 | HLA-A*30:02_ITQDLVQEKY | 781 | MAGB1 | ENSG00000214107 | Melanoma-associated antigen B1 (Cancer/testis |
| | | | | | antigen 3.1)(CT3.1)(DSS-AHC critical interval |
| | | | | | MAGE superfamily 10)(DAM10)(MAGE-Bl |
| | | | | | antigen)(MAGE-XP antigen) |
| 918 | HLA-A*11:01_AVMTKPKVK | 782 | PRDM7 | ENSG00000126856 | Probable histone-lysine N-methyltransferase |
| | | | | | PRDM7 (EC 2.1.1.43)(PR domain zinc finger |
| | | | | | protein 7)(PR domain-containing protein 7) |
| 919 | HLA-A*31:01_IVKVPILNR | 783 | TEX37 | ENSG00000172073 | Testis-expressed sequence 37 protein (Testis- |
| | | | | | specific conserved protein of 21 kDa) |
| 920 | HLA-B*35:01_LAVAVPVVY | 784 | NPBW1 | ENSG00000183729 | Neuropeptides B/W receptor type 1 (G-protein |
| | | | | | coupled receptor 7) |
| 921 | HLA-A*11:01_SVIDVQLGK | 785 | IRPL2 | ENSG00000189108 | X-linked interleukin-1 receptor accessory protein- |
| | | | | | like 2 (IL-1 receptor accessory protein-like 2) |
| | | | | | (IL-1-RAPL-2)(IL-1RAPL-2)(IL1RAPL-2) |
| | | | | | (IL1RAPL-2-related protein)(Interleukin-1 |
| | | | | | receptor 9)(IL-1R-9)(IL-1R9)(Three |
| | | | | | immunoglobulin domain-containing IL-1 |
| | | | | | receptor-related 1)(TIGIRR-1) |
| 922 | HLA-B*51:01_SAFGYLHSI | 786 | 1A1L2 | ENSG00000205126 | Probable inactive 1-aminocyclopropane-1- |
| | | | | | carboxylate synthase-like protein 2 (ACC |
| | | | | | synthase-like protein 2) |
| 923 | HLA-A*11:01_ASGPPAKAK | 787 | VCX3B | ENSG00000205642 | Variable charge X-linked protein 3B (Variably |
| | | | | | charged protein X-C)(VCX-C) |
| 924 | HLA-B*44:03_EEPLSVTAKY | 209 | VCX3B | ENSG00000205642 | Variable charge X-linked protein 3B (Variably |
| | | | | | charged protein X-C)(VCX-C) |
| 925 | HLA-A*24:02_AYIPKLLQLF | 788 | A0A1B0GTN1 | ENSG00000224960 | Putative SMEK homolog 3 |
| 926 | HLA-A*11:01_GTIPGPIAQR | 789 | SHP1L | ENSG00000157060 | Testicular spindle-associated protein SHCBP1L |
| | | | | | (SHC SH2 domain-binding protein 1-like protein) |
| 927 | HLA-A*03:01_KTNPSVFFVK | 790 | SHP1L | ENSG00000157060 | Testicular spindle-associated protein SHCBP1L |
| | | | | | (SHC SH2 domain-binding protein 1-like protein) |
| 928 | HLA-A*11:01_STLGGVNMK | 791 | SHP1L | ENSG00000157060 | Testicular spindle-associated protein SHCBP1L |
| | | | | | (SHC SH2 domain-binding protein 1-like protein) |
| 929 | HLA-B*51:01_VPADSFRTI | 792 | SHP1L | ENSG00000157060 | Testicular spindle-associated protein SHCBP1L |
| | | | | | (SHC SH2 domain-binding protein 1-like protein) |
| 930 | HLA-B*44:03_EEMNILAKL | 793 | TRI60 | ENSG00000176979 | Tripartite motif-containing protein 60 (RING |
| | | | | | finger protein 129)(RING finger protein 33) |
| 931 | HLA-B*44:02_QELLERQAW | 524 | ASCL4 | ENSG00000187855 | Achaete-scute homolog 4 (ASH-4)(hASH4) |
| | | | | | (Achaete-scute-like protein 4)(Class A basic |
| | | | | | helix-loop-helix protein 44)(bHLHa44) |
| 932 | HLA-A*11:01_SVQEIYNFTR | 794 | FOXR2 | ENSG00000189299 | Forkhead box protein R2 (Forkhead box protein |
| | | | | | N6) |
| 933 | HLA-A*03:01_VLNQPGILK | 795 | A0A1B0GUY1 | ENSG00000248109 | Uncharacterized protein |
| 934 | HLA-A*11:01_SIAPNIFLK | 796 | F71F1 | ENSG00000135248 | Protein FAM71F1 (Protein FAM137A)(Testis |
| | | | | | development protein NYD-SP18) |
| 935 | HLA-C*05:01_IADVDVQEV | 797 | UROL1 | ENSG00000177398 | Uromodulin-like 1 (Olfactorin) |
| 936 | HLA-A*11:01_ASGPPAPAR | 798 | NGN1 | ENSG00000181965 | Neurogenin-1 (NGN-1)(Class A basic helix-loop- |
| | | | | | helix protein 6)(bHLHa6)(Neurogenic basic- |
| | | | | | helix-loop-helix protein)(Neurogenic |
| | | | | | differentiation factor 3)(NeuroD3) |
| 937 | HLA-B*51:01_LPLYVKEI | 799 | SGCZ | ENSG00000185053 | Zeta-sarcoglycan (Zeta-SG)(ZSG1) |
| 938 | HLA-A*29:02_TFPITGLRY | 800 | DYTN | ENSG00000232125 | Dystrotelin |
| 939 | HLA-B*44:03_SEAGVYVLRF | 801 | S14L3 | ENSG00000100012 | SEC14-like protein 3 (Tocopherol-associated |
| | | | | | protein 2) |
| 940 | HLA-B*35:01_YPVTLNVLY | 802 | PSG8 | ENSG00000124467 | Pregnancy-specific beta-1-glycoprotein 8 (PS- |
| | | | | | beta-G-8)(PSBG-8)(Pregnancy-specific |
| | | | | | glycoprotein 8) |
| 941 | HLA-B*18:01_SEKISYVY | 803 | SSX1 | ENSG00000126752 | Protein SSX1 (Cancer/testis antigen 5.1)(CT5.1) |
| | | | | | (Synovial sarcoma, X breakpoint 1) |
| 942 | HLA-A*26:01_EVITSAPGAM | 804 | DPPA2 | ENSG00000163530 | Developmental pluripotency-associated protein 2 |
| | | | | | (Pluripotent embryonic stem cell-related gene 1 |
| | | | | | protein) |
| 943 | HLA-C*02:02_SENDIPSVAF | 283 | DC4L2 | ENSG00000176566 | DDB1-and CUL4-associated factor 4-like protein |
| | | | | | 2 (WD repeat-containing protein 21C) |
| 944 | HLA-C*02:02_EEMQIQKSQW | 569 | NTM2G | ENSG00000188152 | NUT family member 2G |
| 945 | HLA-A*26:01_QVINGEMQFY | 805 | NTM1B | ENSG00000203740 | Alpha N-terminal protein methyltransferase 1B |
| | | | | | (EC 2.1.1.299)(Methyltransferase-like protein |
| | | | | | 11B)(X-Pro-Lys N-terminal protein |
| | | | | | methyltransferase 1B)(NTM1B) |
| 946 | HLA-A*02:07_YLLEKIPLV | 806 | NTM1B | ENSG00000203740 | Alpha N-terminal protein methyltransferase 1B |
| | | | | | (EC 2.1.1.299)(Methyltransferase-like protein |
| | | | | | 11B)(X-Pro-Lys N-terminal protein |
| | | | | | methyltransferase 1B)(NTM1B) |
| 947 | HLA-A*11:01_ASVQGELAQLK | 807 | PTX4 | ENSG00000251692 | Pentraxin-4 |
| 948 | HLA-A*26:01_EVDPAGHSY | 808 | MAGA8 | ENSG00000156009 | Melanoma-associated antigen 8 (Cancer/testis |
| | | | | | antigen 1.8)(CT1.8)(MAGE-8 antigen) |
| 949 | HLA-A*01:01_NSDNVGYASY | 809 | V9GYJ5 | ENSG00000188611 | Neutral ceramidase (Fragment) |
| 950 | HLA-A*26:01_QVADINLMGY | 810 | V9GYJ5 | ENSG00000188611 | Neutral ceramidase (Fragment) |
| 951 | HLA-B*46:01_AAAAAGLAY | 646 | BHE23 | ENSG00000125533 | Class E basic helix-loop-helix protein 23 |
| | | | | | (bHLHe23)(Class B basic helix-loop-helix |
| | | | | | protein 4)(bHLHb4) |
| 952 | HLA-A*11:01_KTADIISEQK | 811 | RNF17 | ENSG00000132972 | RING finger protein 17 (Tudor domain-containing protein 4) |
| 953 | HLA-A*11:01_QTLNNNIAK | 812 | DDX4 | ENSG00000152670 | Probable ATP-dependent RNA helicase DDX4 |
| | | | | | (EC 3.6.4.13)(DEAD box protein 4)(Vasa |
| | | | | | homolog) |
| 954 | HLA-C*02:02_GEMPSERQY | 813 | AXDN1 | ENSG00000162779 | Axonemal dynein light chain domain-containing |
| | | | | | protein 1 |
| 955 | HLA-A*03:01_ITWDAPAITK | 271 | ACHA9 | ENSG00000174343 | Neuronal acetylcholine receptor subunit alpha-9 |
| | | | | | (Nicotinic acetylcholine receptor subunit alpha-9) |
| | | | | | (NACHR alpha-9) |
| 956 | HLA-B*51:01_LPQGSMSSI | 814 | CF010 | ENSG00000204296 | Uncharacterized protein C6orf10 |
| 957 | HLA-B*44:03_SEQSARLLDY | 815 | CF010 | ENSG00000204296 | Uncharacterized protein C6orf10 |
| 958 | HLA-A*11:01_ASFTSFNPK | 816 | M4A18 | ENSG00000214782 | Membrane-spanning 4-domains subfamily A |
| | | | | | member 18 |
| 959 | HLA-C*01:02_QYPVGTASL | 817 | M4A18 | ENSG00000214782 | Membrane-spanning 4-domains subfamily A |
| | | | | | member 18 |
| 960 | HLA-C*02:02_QEFLNVQEY | 655 | MORC1 | ENSG00000114487 | MORC family CW-type zinc finger protein 1 |
| | | | | | (Cancer/testis antigen 33)(CT33) |
| 961 | HLA-C*16:01_IEAIRAEY | 818 | TRI51 | ENSG00000124900 | Tripartite motif-containing protein 51 (SPRY |
| | | | | | domain-containing protein 5) |
| 962 | HLA-C*01:02_SSPEGTREL | 819 | CA094 | ENSG00000142698 | Uncharacterized protein C1orf94 |
| 963 | HLA-A*11:01_AVSSAALTH | 820 | WNT9B | ENSG00000158955 | Protein Wnt-9b (Protein Wnt-14b)(Protein Wnt- |
| | | | | | 15) |
| 964 | HLA-A*11:01_GTLAMILTK | 821 | OVCH1 | ENSG00000187950 | Ovochymase-1 (EC 3.4.21.-) |
| 965 | HLA-A*03:01_SVYDNVRSVGK | 822 | OVCH1 | ENSG00000187950 | Ovochymase-1 (EC 3.4.21.-) |
| 966 | HLA-A*11:01_SVYDNVRSVGK | 822 | OVCH1 | ENSG00000187950 | Ovochymase-1 (EC 3.4.21.-) |
| 967 | HLA-A*29:02_YMSPDIALLY | 823 | OVCH1 | ENSG00000187950 | Ovochymase-1 (EC 3.4.21.-) |
| 968 | HLA-B*35:01_DAWSGSNAY | 824 | CRBA1 | ENSG00000108255 | Beta-crystallin A3 [Cleaved into: Beta-crystallin |
| | | | | | A3, isoform A1, Delta4 form; Beta-crystallin A3, |
| | | | | | isoform A1, Delta7 form; Beta-crystallin A3, |
| | | | | | isoform A1, Delta8 form] |
| 969 | HLA-B*44:03_YEVLTPLKW | 825 | AMELX | ENSG00000125363 | Amelogenin, X isoform |
| 970 | HLA-B*35:01_NASNDTYLY | 826 | CSTL1 | ENSG00000125823 | Cystatin-like 1 (RCET11) |
| 971 | HLA-B*44:03_AEAITAPLF | 827 | RHXF2 | ENSG00000131721 | Rhox homeobox family member 2 (Paired-like |
| | | | | | homeobox protein PEPP-2)(Testis homeobox |
| | | | | | gene 1) |
| 972 | HLA-C*02:02_AEAITAPLF | 827 | RHXF2 | ENSG00000131721 | Rhox homeobox family member 2 (Paired-like |
| | | | | | homeobox protein PEPP-2)(Testis homeobox |
| | | | | | gene 1) |
| 973 | HLA-A*31:01_AVQIWFENR | 828 | RHXF2 | ENSG00000131721 | Rhox homeobox family member 2 (Paired-like |
| | | | | | homeobox protein PEPP-2)(Testis homeobox |
| | | | | | gene 1) |
| 974 | HLA-A*02:07_IVPSFTFPNV | 829 | RHXF2 | ENSG00000131721 | Rhox homeobox family member 2 (Paired-like |
| | | | | | homeobox protein PEPP-2)(Testis homeobox |
| | | | | | gene 1) |
| 975 | HLA-A*01:01_QSEKEPGQQY | 830 | RHXF2 | ENSG00000131721 | Rhox homeobox family member 2 (Paired-like |
| | | | | | homeobox protein PEPP-2)(Testis homeobox |
| | | | | | gene 1) |
| 976 | HLA-B*44:03_SEKEPGQQY | 831 | RHXF2 | ENSG00000131721 | Rhox homeobox family member 2 (Paired-like |
| | | | | | homeobox protein PEPP-2)(Testis homeobox |
| | | | | | gene 1) |
| 977 | HLA-C*02:02_SEKEPGQQY | 831 | RHXF2 | ENSG00000131721 | Rhox homeobox family member 2 (Paired-like |
| | | | | | homeobox protein PEPP-2)(Testis homeobox |
| | | | | | gene 1) |
| 978 | HLA-B*35:01_LPVLENVSY | 832 | NYAP2 | ENSG00000144460 | Neuronal tyro sine-phosphorylated |
| | | | | | phosphoinositide-3-kinase adapter 2 |
| 979 | HLA-B*35:01_MVNAAVNTY | 833 | NYAP2 | ENSG00000144460 | Neuronal tyrosine-phosphorylated |
| | | | | | phosphoinositide-3-kinase adapter 2 |
| 980 | HLA-A*02:01_FLIEQIDVL | 834 | SUN3 | ENSG00000164744 | SUN domain-containing protein 3 (Sad1/unc-84 |
| | | | | | domain-containing protein 1) |
| 981 | HLA-A*24:02_SYLPGLLYKF | 835 | ZPLD1 | ENSG00000170044 | Zona pellucida-like domain-containing protein 1 |
| | | | | | (ZP domain-containing protein 1) |
| 982 | HLA-A*24:02_LYASWMYQL | 836 | TEX19 | ENSG00000182459 | Testis-expressed protein 19 |
| 983 | HLA-A*11:01_AAGIIVIAK | 837 | KCNH7 | ENSG00000184611 | Potassium voltage-gated channel subfamily H |
| | | | | | member 7 (Ether-a-go-go-related gene potassium |
| | | | | | channel 3)(ERG-3)(Eag-related protein 3) |
| | | | | | (Ether-a-go-go-related protein 3)(hERG-3) |
| | | | | | (Voltage-gated potassium channel subunit |
| | | | | | Kv11.3) |
| 984 | HLA-A*11:01_HVSDPGLPGK | 838 | KCNH7 | ENSG00000184611 | Potassium voltage-gated channel subfamily H |
| | | | | | member 7 (Ether-a-go-go-related gene potassium |
| | | | | | channel 3)(ERG-3)(Eag-related protein 3) |
| | | | | | (Ether-a-go-go-related protein 3)(hERG-3) |
| | | | | | (Voltage-gated potassium channel subunit |
| | | | | | Kv11.3) |
| 985 | HLA-A*29:02_IFGEMVHLY | 839 | KCNH7 | ENSG00000184611 | Potassium voltage-gated channel subfamily H |
| | | | | | member 7 (Ether-a-go-go-related gene potassium |
| | | | | | channel 3)(ERG-3)(Eag-related protein 3) |
| | | | | | (Ether-a-go-go-related protein 3)(hERG-3) |
| | | | | | (Voltage-gated potassium channel subunit |
| | | | | | Kv11.3) |
| 986 | HLA-A*11:01_IVDSSPGIGK | 840 | KCNH7 | ENSG00000184611 | Potassium voltage-gated channel subfamily H |
| | | | | | member 7 (Ether-a-go-go-related gene potassium |
| | | | | | channel 3)(ERG-3)(Eag-related protein 3) |
| | | | | | (Ether-a-go-go-related protein 3)(hERG-3) |
| | | | | | (Voltage-gated potassium channel subunit |
| | | | | | Kv11.3) |
| 987 | HLA-A*01:01_TSDSNLNKY | 841 | KCNH7 | ENSG00000184611 | Potassium voltage-gated channel subfamily H |
| | | | | | member 7 (Ether-a-go-go-related gene potassium |
| | | | | | channel 3)(ERG-3)(Eag-related protein 3) |
| | | | | | (Ether-a-go-go-related protein 3)(hERG-3) |
| | | | | | (Voltage-gated potassium channel subunit |
| | | | | | Kv11.3) |
| 988 | HLA-A*11:01_VSDPGLPGK | 842 | KCNH7 | ENSG00000184611 | Potassium voltage-gated channel subfamily H |
| | | | | | member 7 (Ether-a-go-go-related gene potassium |
| | | | | | channel 3)(ERG-3)(Eag-related protein 3) |
| | | | | | (Ether-a-go-go-related protein 3)(hERG-3) |
| | | | | | (Voltage-gated potassium channel subunit |
| | | | | | Kv11.3) |
| 989 | HLA-B*44:03_AEAELTGGSEW | 843 | C9J420 | ENSG00000186038 | 5-hydroxytryptamine receptor 3E (Fragment) |
| 990 | HLA-B*51:01_LPTSGTPLI | 844 | C9J420 | ENSG00000186038 | 5-hydroxytryptamine receptor 3E (Fragment) |
| 991 | HLA-B*35:01_VPTQVNISF | 845 | C9J420 | ENSG00000186038 | 5-hydroxyhyptamine receptor 3E (Fragment) |
| 992 | HLA-A*03:01_SVSGLVLSH | 613 | S22AO | ENSG00000197658 | Solute carrier family 22 member 24 |
| 993 | HLA-C*02:02_TESSVKDPVAW | 846 | MAGB1 | ENSG00000214107 | Melanoma-associated antigen B1 (Cancer/testis |
| | | | | | antigen 3.1)(CT3.1)(DSS-AHC critical interval |
| | | | | | MAGE superfamily 10)(DAM10)(MAGE-Bl |
| | | | | | antigen)(MAGE-XP antigen) |
| 994 | HLA-A*03:01_RSYSPAPGKQK | 847 | NOBOX | ENSG00000106410 | Homeobox protein NOBOX |
| 995 | HLA-B*35:01_EAAPESLDVVY | 848 | R113B | ENSG00000139797 | RING finger protein 113B (Zinc finger protein |
| | | | | | 183-like 1) |
| 996 | HLA-A*29:02_LALSIGTPYRY | 849 | KCNH5 | ENSG00000140015 | Potassium voltage-gated channel subfamily H |
| | | | | | member 5 (Ether-a-go-go potassium channel 2) |
| | | | | | (hEAG2)(Voltage-gated potassium channel |
| | | | | | subunit Kv10.2) |
| 997 | HLA-B*51:01_MPLQVPPQI | 850 | KCNH5 | ENSG00000140015 | Potassium voltage-gated channel subfamily H |
| | | | | | member 5 (Ether-a-go-go potassium channel 2) |
| | | | | | (hEAG2)(Voltage-gated potassium channel |
| | | | | | subunit Kv10.2) |
| 998 | HLA-A*31:01_QVKIWFQNR | 110 | GBX1 | ENSG00000164900 | Homeobox protein GBX-1 (Gastrulation and |
| | | | | | brain-specific homeobox protein 1) |
| 999 | HLA-B*51:01_MAYEKRVLI | 851 | SG1D1 | ENSG00000168515 | Secretoglobin family 1D member 1 (Lipophilin- |
| | | | | | A) |
| 1000 | HLA-A*24:02_VYTVWTALW | 852 | NKAI3 | ENSG00000185942 | Sodium/potassium-transporting ATPase subunit |
| | | | | | beta-1-interacting protein 3 (NaH/K(+)- |
| | | | | | transporting ATPase subunit beta-1-interacting |
| | | | | | protein 3)(Protein FAM77D) |
| 1001 | HLA-B*44:03_KEADPTGHSY | 650 | MAGA1 | ENSG00000198681 | Melanoma-associated antigen 1 (Antigen MZ2-E) |
| | | | | | (Cancer/testis antigen 1.1)(CT1.1)(MAGE-1 |
| | | | | | antigen) |
| 1002 | HLA-A*11:01_GSFGGVLQK | 853 | SKOR2 | ENSG00000215474 | SKI family transcriptional corepressor 2 |
| | | | | | (Functional Smad-suppressing element on |
| | | | | | chromosome 18)(Fussel-18)(LBX1 corepressor |
| | | | | | 1-like protein)(Ladybird homeobox corepressor |
| | | | | | 1-like protein) |
| 1003 | HLA-B*51:01_IPYAASLI | 854 | SKOR2 | ENSG00000215474 | SKI family transcriptional corepressor 2 |
| | | | | | (Functional Smad-suppressing element on |
| | | | | | chromosome 18)(Fussel-18)(LBX1 corepressor |
| | | | | | 1-like protein)(Ladybird homeobox corepressor |
| | | | | | 1-like protein) |
| 1004 | HLA-A*02:07_FLYEVFAQL | 855 | A0A1B0GTN1 | ENSG00000224960 | Putative SMEK homolog 3 |
| 1005 | HLA-C*16:01_NASTRNVVF | 856 | PTX4 | ENSG00000251692 | Pentraxin-4 |
| 1006 | HLA-A*11:01_QTQLIPVQK | 857 | ZP4 | ENSG00000116996 | Zona pellucida sperm-binding protein 4 (Zona |
| | | | | | pellucida glycoprotein 4)(Zp-4)(Zona pellucida |
| | | | | | protein B)[Cleaved into: Processed zona |
| | | | | | pellucida sperm-binding protein 41 |
| 1007 | HLA-B*44:03_AEDLAKAQRW | 858 | Q5T1N2 | ENSG00000162641 | Protein AKNAD1 |
| 1008 | HLA-A*11:01_KSYQGQSPQK | 859 | Q5T1N2 | ENSG00000162641 | Protein AKNAD1 |
| 1009 | HLA-B*51:01_LPYDGDLSQI | 860 | Q5T1N2 | ENSG00000162641 | Protein AKNAD1 |
| 1010 | HLA-A*11:01_SSSSYIFQK | 861 | Q5T1N2 | ENSG00000162641 | Protein AKNAD1 |
| 1011 | HLA-B*44:03_MEDESNKLW | 862 | ESPB1 | ENSG00000169393 | Epididymal sperm-binding protein 1 (Epididymal |
| | | | | | secretoiy protein 12)(hE12) |
| 1012 | HLA-A*29:02_IVGENSLEY | 863 | ZFP42 | ENSG00000179059 | Zinc finger protein 42 homolog (Zfp-42) |
| | | | | | (Reduced expression protein 1)(REX-1)(hREX- |
| | | | | | 1)(Zinc finger protein 754) |
| 1013 | HLA-B*51:01_LPKLPIPYI | 864 | PSG9 | ENSG00000183668 | Pregnancy-specific beta-1-glycoprotein 9 (PS- |
| | | | | | beta-G-9)(PSBG-9)(Pregnancy-specific |
| | | | | | glycoprotein 9)(PS34)(Pregnancy-specific beta- |
| | | | | | 1 glycoprotein B)(PS-beta-B)(Pregnancy- |
| | | | | | specific beta-1-glycoprotein 11)(PS-beta-G-11) |
| | | | | | (PSBG-11)(Pregnancy-specific glycoprotein 11) |
| | | | | | (Pregnancy-specific glycoprotein 7)(PSG7) |
| 1014 | HLA-B*44:03_QEWTDYRLTW | 865 | ACHB4 | ENSG00000117971 | Neuronal acetylcholine receptor subunit beta-4 |
| 1015 | HLA-B*46:01_AAAAAAATY | 372 | NKX24 | ENSG00000125816 | Homeobox protein Nkx-2.4 (Homeobox protein |
| | | | | | NK-2 homolog D) |
| 1016 | HLA-B*51:01_DANLANTII | 866 | SPI2A | ENSG00000147059 | Spindlin-2A (Protein DXF34)(Spindlin-like |
| | | | | | protein 2A)(SPIN-2)(SPIN-2A) |
| 1017 | HLA-B*51:01_DANLANTI | 867 | SPI2A | ENSG00000147059 | Spindlin-2A (Protein DXF34)(Spindlin-like |
| | | | | | protein 2A)(SPIN-2)(SPIN-2A) |
| 1018 | HLA-B*44:03_KEGDEPITQW | 868 | SPI2A | ENSG00000147059 | Spindlin-2A (Protein DXF34)(Spindlin-like |
| | | | | | protein 2A)(SPIN-2)(SPIN-2A) |
| 1019 | HLA-B*51:01_DPMLTAAAI | 869 | SL9C1 | ENSG00000172139 | Sodium/hydrogen exchanger 10 (Na(+)/H(+) |
| | | | | | exchanger 10)(NHE-10)(Solute carrier family 9 |
| | | | | | member 10)(Solute carrier family 9 member Cl) |
| | | | | | (Sperm-specific Na(+)/H(+) exchanger)(sNHE) |
| 1020 | HLA-B*18:01_EEFEHVGY | 870 | SL9C1 | ENSG00000172139 | Sodium/hydrogen exchanger 10 (Na(+)/H(+) |
| | | | | | exchanger 10)(NHE-10)(Solute carrier family 9 |
| | | | | | member 10)(Solute carrier family 9 member Cl) |
| | | | | | (Sperm-specific Na(+)/H(+) exchanger)(sNHE) |
| 1021 | HLA-B*51:01_FPIPVPVI | 871 | SL9C1 | ENSG00000172139 | Sodium/hydrogen exchanger 10 (Na(+)/H(+) |
| | | | | | exchanger 10)(NHE-10)(Solute carrier family 9 |
| | | | | | member 10)(Solute carrier family 9 member Cl) |
| | | | | | (Sperm-specific Na(+)/H(+) exchanger)(sNHE) |
| 1022 | HLA-B*18:01_NETEVIVF | 872 | SL9C1 | ENSG00000172139 | Sodium/hydrogen exchanger 10 (Na(+)/H(+) |
| | | | | | exchanger 10)(NHE-10)(Solute carrier family 9 |
| | | | | | member 10)(Solute carrier family 9 member Cl) |
| | | | | | (Sperm-specific Na(+)/H(+) exchanger)(sNHE) |
| 1023 | HLA-B*44:03_SESQKTVTF | 873 | SL9C1 | ENSG00000172139 | Sodium/hydrogen exchanger 10 (Na(+)/H(+) |
| | | | | | exchanger 10)(NHE-10)(Solute carrier family 9 |
| | | | | | member 10)(Solute carrier family 9 member Cl) |
| | | | | | (Sperm-specific Na(+)/H(+) exchanger)(sNHE) |
| 1024 | HLA-C*02:02_SESQKTVTF | 873 | SL9C1 | ENSG00000172139 | Sodium/hydrogen exchanger 10 (Na(+)/H(+) |
| | | | | | exchanger 10)(NHE-10)(Solute carrier family 9 |
| | | | | | member 10)(Solute carrier family 9 member Cl) |
| | | | | | (Sperm-specific Na(+)/H(+) exchanger)(sNHE) |
| 1025 | HLA-B*35:01_EPLSVTAKY | 874 | VCX1 | ENSG00000182583 | Variable charge X-linked protein 1 (Variable |
| | | | | | charge protein on X with ten repeats)(VCX-10r) |
| | | | | | (Variably charged protein X-B1)(VCX-B1) |
| 1026 | HLA-C*02:02_TEVVEGKEW | 272 | NPSR1 | ENSG00000187258 | Neuropeptide S receptor (G-protein coupled |
| | | | | | receptor 154)(G-protein coupled receptor |
| | | | | | PGR14)(G-protein coupled receptor for asthma |
| | | | | | susceptibility) |
| 1027 | HLA-A*24:02_VYLPKIPSW | 875 | E5RK72 | ENSG00000215262 | Potassium channel subfamily U member 1 |
| 1028 | HLA-B*51:01_MPLLPSTV | 876 | CRSPL | ENSG00000101074 | Peptidase inhibitor R3HDML (Cysteine-rich |
| | | | | | secretory protein R3HDML) |
| 1029 | HLA-A*29:02_NFPQFPETLSY | 877 | MROH9 | ENSG00000117501 | Maestro heat-like repeat-containing protein |
| | | | | | family member 9 |
| 1030 | HLA-B*18:01_NESSLVEQM | 878 | NDST4 | ENSG00000138653 | Bifunctional heparan sulfate N-deacetylase/N- |
| | | | | | sulfotransferase 4 (EC 2.8.2.8)(Glucosaminyl N- |
| | | | | | deacetylase/N-sulfotransferase 4)(NDST-4)(N- |
| | | | | | heparan sulfate sulfotransferase 4)(N-HSST 4) |
| | | | | | [Includes: Heparan sulfate N-deacetylase 4 (EC |
| | | | | | 3.-.-.-); Heparan sulfate N-sulfotransferase 4 (EC |
| | | | | | 2.8.2.-)] |
| 1031 | HLA-A*11:01_KTITHIVAK | 879 | SHP1L | ENSG00000157060 | Testicular spindle-associated protein SHCBP1L |
| | | | | | (SHC SH2 domain-binding protein 1-like protein) |
| 1032 | HLA-A*02:07_LVDEILEEL | 880 | SHP1L | ENSG00000157060 | Testicular spindle-associated protein SHCBP1L |
| | | | | | (SHC SH2 domain-binding protein 1-like protein) |
| 1033 | HLA-A*11:01_GTQDPGLLVPK | 881 | SP7 | ENSG00000170374 | Transcription factor Sp7 (Zinc finger protein |
| | | | | | osterix) |
| 1034 | HLA-B*44:03_EEIVLGQRL | 882 | XKR3 | ENSG00000172967 | XK-related protein 3 (X Kell blood group-related |
| | | | | | 3)(XTES) |
| 1035 | HLA-A*26:01_EVISRVVTL | 883 | XKR3 | ENSG00000172967 | XK-related protein 3 (X Kell blood group-related |
| | | | | | 3)(XTES) |
| 1036 | HLA-A*11:01_NTYASTLYK | 884 | FGF16 | ENSG00000196468 | Fibroblast growth factor 16 (FGF-16) |
| 1037 | HLA-A*26:01_EVISVVLKY | 885 | TRPC7 | ENSG00000069018 | Short transient receptor potential channel 7 |
| | | | | | (TipC7)(Transient receptor protein 7)(TRP-7) |
| | | | | | (hTRP7) |
| 1038 | HLA-A*29:02_EVISVVLKY | 885 | TRPC7 | ENSG00000069018 | Short transient receptor potential channel 7 |
| | | | | | (TipC7)(Transient receptor protein 7)(TRP-7) |
| | | | | | (hTRP7) |
| 1039 | HLA-B*18:01_IETEFKNDY | 886 | TRPC7 | ENSG00000069018 | Short transient receptor potential channel 7 |
| | | | | | (TrpC7)(Transient receptor protein 7)(TRP-7) |
| | | | | | (hTRP7) |
| 1040 | HLA-B*44:02_SEKEPGQQY | 831 | RHXF2 | ENSG00000131721 | Rhox homeobox family member 2 (Paired-like |
| | | | | | homeobox protein PEPP-2)(Testis homeobox |
| | | | | | gene 1) |
| 1041 | HLA-A*29:02_IVISAYFLY | 887 | NDST4 | ENSG00000138653 | Bifunctional heparan sulfate N-deacetylase/N- |
| | | | | | sulfotransferase 4 (EC 2.8.2.8)(Glucosaminyl N- |
| | | | | | deacetylase/N-sulfotransferase 4)(NDST-4)(N- |
| | | | | | heparan sulfate sulfotransferase 4)(N-HSST 4) |
| | | | | | [Includes: Heparan sulfate N-deacetylase 4 (EC |
| | | | | | 3.-.-.-); Heparan sulfate N-sulfotransferase 4 (EC |
| | | | | | 2.8.2.-)] |
| 1042 | HLA-A*02:07_VMDEVQKFL | 888 | NDST4 | ENSG00000138653 | Bifunctional heparan sulfate N-deacetylase/N- |
| | | | | | sulfotransferase 4 (EC 2.8.2.8)(Glucosaminyl N- |
| | | | | | deacetylase/N-sulfotransferase 4)(NDST-4)(N- |
| | | | | | heparan sulfate sulfotransferase 4)(N-HSST 4) |
| | | | | | [Includes: Heparan sulfate N-deacetylase 4 (EC |
| | | | | | 3.-.-.-); Heparan sulfate N-sulfotransferase 4 (EC |
| | | | | | 2.8.2.-)] |
| 1043 | HLA-A*29:02_AFPHHPMGMLY | 889 | X6R6V8 | ENSG00000143552 | Nuclear pore membrane glycoprotein 210-like |
| 1044 | HLA-A*11:01_ASMSVTPVYK | 890 | X6R6V8 | ENSG00000143552 | Nuclear pore membrane glycoprotein 210-like |
| 1045 | HLA-A*30:02_ASMSVTPVY | 891 | X6R6V8 | ENSG00000143552 | Nuclear pore membrane glycoprotein 210-like |
| 1046 | HLA-B*18:01_DEVQILVF | 892 | X6R6V8 | ENSG00000143552 | Nuclear pore membrane glycoprotein 210-like |
| 1047 | HLA-A*33:01_DVINSIEIVSR | 893 | X6R6V8 | ENSG00000143552 | Nuclear pore membrane glycoprotein 210-like |
| 1048 | HLA-A*26:01_ETFSLVEGSGY | 894 | X6R6V8 | ENSG00000143552 | Nuclear pore membrane glycoprotein 210-like |
| 1049 | HLA-A*33:01_EYSENYILR | 895 | X6R6V8 | ENSG00000143552 | Nuclear pore membrane glycoprotein 210-like |
| 1050 | HLA-A*24:02_FYNSIGEKF | 896 | X6R6V8 | ENSG00000143552 | Nuclear pore membrane glycoprotein 210-like |
| 1051 | HLA-B*35:01_HPASMSVTPVY | 897 | X6R6V8 | ENSG00000143552 | Nuclear pore membrane glycoprotein 210-like |
| 1052 | HLA-B*18:01_IEIPIAMY | 898 | X6R6V8 | ENSG00000143552 | Nuclear pore membrane glycoprotein 210-like |
| 1053 | HLA-A*02:01_ILDDKTAMV | 899 | X6R6V8 | ENSG00000143552 | Nuclear pore membrane glycoprotein 210-like |
| 1054 | HLA-A*02:07_ILDDKTAMV | 899 | X6R6V8 | ENSG00000143552 | Nuclear pore membrane glycoprotein 210-like |
| 1055 | HLA-A*01:01_ISDNLRITY | 900 | X6R6V8 | ENSG00000143552 | Nuclear pore membrane glycoprotein 210-like |
| 1056 | HLA-A*11:01_IVTGVGVAR | 901 | X6R6V8 | ENSG00000143552 | Nuclear pore membrane glycoprotein 210-like |
| 1057 | HLA-A*24:02_IYNHPDVKETF | 902 | X6R6V8 | ENSG00000143552 | Nuclear pore membrane glycoprotein 210-like |
| 1058 | HLA-A*24:02_KYLESSATF | 903 | X6R6V8 | ENSG00000143552 | Nuclear pore membrane glycoprotein 210-like |
| 1059 | HLA-B*51:01_LPFHADVEI | 904 | X6R6V8 | ENSG00000143552 | Nuclear pore membrane glycoprotein 210-like |
| 1060 | HLA-A*02:01_LQTDIVTGV | 905 | X6R6V8 | ENSG00000143552 | Nuclear pore membrane glycoprotein 210-like |
| 1061 | HLA-B*35:01_NASLTSIIY | 906 | X6R6V8 | ENSG00000143552 | Nuclear pore membrane glycoprotein 210-like |
| 1062 | HLA-A*02:01_QLASAIVTL | 907 | X6R6V8 | ENSG00000143552 | Nuclear pore membrane glycoprotein 210-like |
| 1063 | HLA-A*11:01_QTNLVFVHK | 908 | X6R6V8 | ENSG00000143552 | Nuclear pore membrane glycoprotein 210-like |
| 1064 | HLA-A*11:01_QTTLVAIAK | 909 | X6R6V8 | ENSG00000143552 | Nuclear pore membrane glycoprotein 210-like |
| 1065 | HLA-B*44:03_SEAVVVRAM | 910 | X6R6V8 | ENSG00000143552 | Nuclear pore membrane glycoprotein 210-like |
| 1066 | HLA-B*18:01_SEQGVVTITY | 911 | X6R6V8 | ENSG00000143552 | Nuclear pore membrane glycoprotein 210-like |
| 1067 | HLA-B*44:02_SEQGVVTITY | 911 | X6R6V8 | ENSG00000143552 | Nuclear pore membrane glycoprotein 210-like |
| 1068 | HLA-B*44:03_SEQGVVTITY | 911 | X6R6V8 | ENSG00000143552 | Nuclear pore membrane glycoprotein 210-like |
| 1069 | HLA-C*02:02_SEQGVVTITY | 911 | X6R6V8 | ENSG00000143552 | Nuclear pore membrane glycoprotein 210-like |
| 1070 | HLA-A*02:01_SLGHTLVTV | 912 | X6R6V8 | ENSG00000143552 | Nuclear pore membrane glycoprotein 210-like |
| 1071 | HLA-A*26:01_STASIFLAY | 913 | X6R6V8 | ENSG00000143552 | Nuclear pore membrane glycoprotein 210-like |
| 1072 | HLA-A*29:02_STASIFLAY | 913 | X6R6V8 | ENSG00000143552 | Nuclear pore membrane glycoprotein 210-like |
| 1073 | HLA-B*35:01_TPMEQQDEY | 914 | X6R6V8 | ENSG00000143552 | Nuclear pore membrane glycoprotein 210-like |
| 1074 | HLA-A*29:02_VFEKLQLFY | 915 | X6R6V8 | ENSG00000143552 | Nuclear pore membrane glycoprotein 210-like |
| 1075 | HLA-A*24:02_VYVITVDVF | 916 | X6R6V8 | ENSG00000143552 | Nuclear pore membrane glycoprotein 210-like |
| 1076 | HLA-A*02:07_YVDDSPLEL | 917 | X6R6V8 | ENSG00000143552 | Nuclear pore membrane glycoprotein 210-like |
| 1077 | HLA-C*05:01_YVDDSPLEL | 917 | X6R6V8 | ENSG00000143552 | Nuclear pore membrane glycoprotein 210-like |
| 1078 | HLA-A*01:01_ETDALDIDY | 918 | CNTP5 | ENSG00000155052 | Contactin-associated protein-like 5 (Cell |
| | | | | | recognition molecule Caspr5) |
| 1079 | HLA-A*11:01_GTQSTHESLK | 919 | I22R2 | ENSG00000164485 | Interleukin-22 receptor subunit alpha-2 (IL-22 |
| | | | | | receptor subunit alpha-2)(IL-22R-alpha-2)(IL- |
| | | | | | 22RA2)(Cytokine receptor class-II member 10) |
| | | | | | (Cytokine receptor family 2 member 10)(CRF2- |
| | | | | | 10)(Cytokine receptor family type 2, soluble 1) |
| | | | | | (CRF2-S1)(Interleukin-22-binding protein)(IL- |
| | | | | | 22BP)(IL22BP)(ZcytoR16) |
| 1080 | HLA-A*02:01_QLLDGFMITL | 920 | PASD1 | ENSG00000166049 | Circadian clock protein PASD1 (Cancer/testis |
| | | | | | antigen 63)(CT63)(OX-TES-1)(PAS domain- |
| | | | | | containing protein 1) |
| 1081 | HLA-A*01:01_KTELETALY | 921 | GG6L2 | ENSG00000174450 | Golgin subfamily A member 6-like protein 2 |
| 1082 | HLA-B*51:01_LPPSLQSSL | 922 | GG6L2 | ENSG00000174450 | Golgin subfamily A member 6-like protein 2 |
| 1083 | HLA-C*02:02_AESPLEVPQSF | 626 | MAGBG | ENSG00000189023 | Melanoma-associated antigen B16 (MAGE-B16 |
| | | | | | antigen) |
| 1084 | HLA-B*46:01_AGMTIATSY | 250 | SYCY2 | ENSG00000244476 | Syncytin-2 (Endogenous retrovirus group FRD |
| | | | | | member 1)(Envelope polyprotein)(HERV-FRD) |
| | | | | | (HERV-FRD 6p24.1 provirus ancestral Env |
| | | | | | polyprotein)[Cleaved into: Surface protein (SU); |
| | | | | | Transmembrane protein (TM)] |
| 1085 | HLA-A*24:02_VYGDPHYVTF | 923 | ZAN | ENSG00000146839 | Zonadhesin |
| 1086 | HLA-A*29:02_LFWKPLRY | 924 | S6A18 | ENSG00000164363 | Sodium-dependent neutral amino acid transporter |
| | | | | | B(0)AT3 (Sodium-and chloride-dependent |
| | | | | | transporter XTRP2)(Solute carrier family 6 |
| | | | | | member 18)(System B(0) neutral amino acid |
| | | | | | transporter AT3) |
| 1087 | HLA-B*08:01_QVLVKKISQ | 925 | S100G | ENSG00000169906 | Protein S100-G (Calbindin-D9k)(S100 calcium- |
| | | | | | binding protein G)(Vitamin D-dependent |
| | | | | | calcium-binding protein, intestinal)(CABP) |
| 1088 | HLA-B*27:02_GRTVAVAEY | 926 | KR204 | ENSG00000206105 | Putative keratin-associated protein 20-4 |
| 1089 | HLA-B*51:01_DAPSKGPSI | 927 | CL071 | ENSG00000214700 | Uncharacterized protein C12orf71 |
| 1090 | HLA-A*02:07_YVDNVSARV | 928 | GFRA4 | ENSG00000125861 | GDNF family receptor alpha-4 (GDNF receptor |
| | | | | | alpha-4)(GDNER-alpha-4)(GER-alpha-4) |
| | | | | | (Persephin receptor) |
| 1091 | HLA-A*01:01_VLDDGSIDY | 929 | LYZL2 | ENSG00000151033 | Lysozyme-like protein 2 (Lysozyme-2)(EC |
| | | | | | 3.2.1.17) |
| 1092 | HLA-A*30:02_AVFEAGTSVTY | 930 | CNTP5 | ENSG00000155052 | Contactin-associated protein-like 5 (Cell |
| | | | | | recognition molecule Caspr5) |
| 1093 | HLA-A*02:01_FLIPYVIAL | 931 | S6A18 | ENSG00000164363 | Sodium-dependent neutral amino acid transporter |
| | | | | | B(0)AT3 (Sodium-and chloride-dependent |
| | | | | | transporter XTRP2)(Solute carrier family 6 |
| | | | | | member 18)(System B(0) neutral amino acid |
| | | | | | transporter AT3) |
| 1094 | HLA-A*29:02_FVSPKGVLAY | 932 | S7A13 | ENSG00000164893 | Solute carrier family 7 member 13 (Sodium- |
| | | | | | independent aspartate/glutamate transporter 1) |
| | | | | | (X-amino acid transporter 2) |
| 1095 | HLA-A*30:02_GQALLLAEY | 933 | S7A13 | ENSG00000164893 | Solute carrier family 7 member 13 (Sodium- |
| | | | | | independent aspartate/glutamate transporter 1) |
| | | | | | (X-amino acid transporter 2) |
| 1096 | HLA-B*35:01_DPYATITY | 934 | SAGE1 | ENSG00000181433 | Sarcoma antigen 1 (Cancer/testis antigen 14) |
| | | | | | (CT14) |
| 1097 | HLA-A*29:02_FFSDFGLLWY | 935 | NALP9 | ENSG00000185792 | NACHT, LRR and PYD domains-containing |
| | | | | | protein 9 (Nucleotide-binding oligomerization |
| | | | | | domain protein 6)(PYRIN and NACHT- |
| | | | | | containing protein 12) |
| 1098 | HLA-B*51:01_FPLATQLNV | 936 | PRR27 | ENSG00000187533 | Proline-rich protein 27 |
| 1099 | HLA-A*01:01_YTDTGLPSY | 937 | PRR27 | ENSG00000187533 | Proline-rich protein 27 |
| 1100 | HLA-A*24:02_IYPTVDREHF | 938 | RFA4 | ENSG00000204086 | Replication protein A 30 kDa subunit (RP-A p30) |
| | | | | | (Replication factor A protein 4)(RF-A protein 4) |
| 1101 | HLA-A*29:02_LLNPVIATY | 939 | CB061 | ENSG00000239605 | Uncharacterized protein C2orf61 |
| 1102 | HLA-A*30:02_LLNPVIATY | 939 | CB061 | ENSG00000239605 | Uncharacterized protein C2orf61 |
| 1103 | HLA-B*46:01_LLNPVIATY | 939 | CB061 | ENSG00000239605 | Uncharacterized protein C2orf61 |
| 1104 | HLA-A*01:01_LTDTPIPGTY | 940 | CB061 | ENSG00000239605 | Uncharacterized protein C2orf61 |
| 1105 | HLA-A*26:01_EVIGPDGIITV | 941 | ROP1A | ENSG00000065371 | Ropporin-1A (Cancer/testis antigen 91)(CT9 I) |
| | | | | | (Rhophilin-associated protein 1A) |
| 1106 | HLA-B*18:01_NESPQTNEF | 942 | TPTE2 | ENSG00000132958 | Phosphatidylinositol 3,4,5-trisphosphate 3- |
| | | | | | phosphatase TPTE2 (EC 3.1.3.67)(Lipid |
| | | | | | phosphatase TPIP)(TPTE and PTEN |
| | | | | | homologous inositol lipid phosphatase) |
| 1107 | HLA-A*29:02_YFAQVKHLY | 943 | TPTE2 | ENSG00000132958 | Phosphatidylinositol 3,4,5-trisphosphate 3- |
| | | | | | phosphatase TPTE2 (EC 3.1.3.67)(Lipid |
| | | | | | phosphatase TPIP)(TPTE and PTEN |
| | | | | | homologous inositol lipid phosphatase) |
| 1108 | HLA-A*33:01_EANSMNTLR | 944 | LGSN | ENSG00000146166 | Lengsin (Glutamate-ammonia ligase domain- |
| | | | | | containing protein 1)(Lens glutamine synthase- |
| | | | | | like) |
| 1109 | HLA-A*01:01_GSDDHQYIY | 945 | DMP1 | ENSG00000152592 | Dentin matrix acidic phosphoprotein 1 (DMP-1) |
| | | | | | (Dentin matrix protein 1) |
| 1110 | HLA-C*02:02_AEVNVKGLF | 946 | LMTD1 | ENSG00000152936 | Lamin tail domain-containing protein 1 |
| | | | | | (Intermediate filament tail domain-containing |
| | | | | | protein 1) |
| 1111 | HLA-A*26:01_ETSDIQEPYY | 947 | I22R2 | ENSG00000164485 | Interleukin-22 receptor subunit alpha-2 (IL-22 |
| | | | | | receptor subunit alpha-2)(IL-22R-alpha-2)(IL- |
| | | | | | 22RA2)(Cytokine receptor class-II member 10) |
| | | | | | (Cytokine receptor family 2 member 10)(CRF2- |
| | | | | | 10)(Cytokine receptor family type 2, soluble 1) |
| | | | | | (CRF2-S1)(Interleukin-22-binding protein)(IL- |
| | | | | | 22BP)(IL22BP)(ZcytoR16) |
| 1112 | HLA-A*02:07_LVIDTVTEV | 302 | SPERT | ENSG00000174015 | Spermatid-associated protein (Protein chibby |
| | | | | | homolog 2) |
| 1113 | HLA-A*11:01_ASQKAIIFK | 948 | MAGB6 | ENSG00000176746 | Melanoma-associated antigen B6 (Cancer/testis |
| | | | | | antigen 3.4)(CT3.4)(MAGE-B6 antigen) |
| 1114 | HLA-A*01:01_ITEDLVQDKY | 949 | MAGB6 | ENSG00000176746 | Melanoma-associated antigen B6 (Cancer/testis |
| | | | | | antigen 3.4)(CT3.4)(MAGE-B6 antigen) |
| 1115 | HLA-C*02:02_KEMDSSGESY | 950 | MAGB6 | ENSG00000176746 | Melanoma-associated antigen B6 (Cancer/testis |
| | | | | | antigen 3.4)(CT3.4)(MAGE-B6 antigen) |
| 1116 | HLA-A*26:01_ELYEGTLGKY | 951 | SG1C1 | ENSG00000188076 | Secretoglobin family 1C member 1 |
| | | | | | (Secretoglobin RYD5) |
| 1117 | HLA-B*08:01_QPMHKAEL | 952 | SG1C1 | ENSG00000188076 | Secretoglobin family 1C member 1 |
| | | | | | (Secretoglobin RYD5) |
| 1118 | HLA-B*44:02_EEIENLYRF | 222 | MEIG1 | ENSG00000197889 | Meiosis expressed gene 1 protein homolog |
| 1119 | HLA-B*51:01_IPILQKPLI | 953 | NANGN | ENSG00000205857 | NANOG neighbor homeobox (Homeobox protein |
| | | | | | C14) |
| 1120 | HLA-B*44:02_SEDEQNGKQKW | 954 | NANGN | ENSG00000205857 | NANOG neighbor homeobox (Homeobox protein |
| | | | | | C14) |
| 1121 | HLA-B*44:03_SEDEQNGKQKW | 954 | NANGN | ENSG00000205857 | NANOG neighbor homeobox (Homeobox protein |
| | | | | | C14) |
| 1122 | HLA-C*02:02_SEDEQNGKQKW | 954 | NANGN | ENSG00000205857 | NANOG neighbor homeobox (Homeobox protein |
| | | | | | C14) |
| 1123 | HLA-A*02:01_WLTPVIPAL | 955 | NANGN | ENSG00000205857 | NANOG neighbor homeobox (Homeobox protein |
| | | | | | C14) |
| 1124 | HLA-B*27:02_TLQSILAIVK | 956 | GNAT3 | ENSG00000214415 | Guanine nucleotide-binding protein G(t) subunit |
| | | | | | alpha-3 (Gustducin alpha-3 chain) |
| 1125 | HLA-C*05:01_IADIVTSVF | 957 | A0A1B0GTN1 | ENSG00000224960 | Putative SMEK homolog 3 |
| 1126 | HLA-B*44:03_NEAYIPKLL | 958 | A0A1B0GTN1 | ENSG00000224960 | Putative SMEK homolog 3 |
| 1127 | HLA-C*04:01_TYDEQFQGM | 959 | A0A1B0GTN1 | ENSG00000224960 | Putative SMEK homolog 3 |
| 1128 | HLA-B*18:01_DEDSIFAHY | 960 | DDX4 | ENSG00000152670 | Probable ATP-dependent RNA helicase DDX4 |
| | | | | | (EC 3.6.4.13)(DEAD box protein 4)(Vasa |
| | | | | | homolog) |
| 1129 | HLA-A*11:01_ITQGNTLLR | 961 | CC049 | ENSG00000163632 | Putative uncharacterized protein C3orf49 |
| 1130 | HLA-B*44:03_WEVDVEKATRW | 962 | TRIMM | ENSG00000179046 | Probable E3 ubiquitin-protein ligase TRIML2 |
| | | | | | (EC 2.3.2.27)(RING-type E3 ubiquitin |
| | | | | | transferase TRIML2)(SPRY domain-containing |
| | | | | | protein 6)(Tripartite motif family-like protein 2) |
| 1131 | HLA-A*02:07_ALPNKLEEL | 963 | UTS2B | ENSG00000188958 | Urotensin-2B (Urotensin II-related peptide) |
| | | | | | (Urotensin IIB)(U-IIB)(UIIB)(Urotensin-2 |
| | | | | | domain-containing protein) |
| 1132 | HLA-B*44:03_NEIFPDKKY | 964 | UTS2B | ENSG00000188958 | Urotensin-2B (Urotensin II-related peptide) |
| | | | | | (Urotensin IIB)(U-IIB)(UIIB)(Urotensin-2 |
| | | | | | domain-containing protein) |
| 1133 | HLA-B*51:01_NPYFQNKVI | 965 | TSPY1 | ENSG00000258992 | Testis-specific Y-encoded protein 1 (Cancer/testis |
| | | | | | antigen 78)(CT78) |
| 1134 | HLA-A*30:02_TTAPGTVHSY | 403 | Q5JUY5 | ENSG00000117400 | Thrombopoietin receptor |
| 1135 | HLA-B*51:01_LPALLASLI | 966 | PERL | ENSG00000167419 | Lactoperoxidase (LPO)(EC 1.11.1.7)(Salivary |
| | | | | | peroxidase)(SPO) |
| 1136 | HLA-B*44:02_SEFEQIRLF | 491 | TRI60 | ENSG00000176979 | Tripartite motif-containing protein 60 (RING |
| | | | | | finger protein 129)(RING finger protein 33) |
| 1137 | HLA-A*02:01_LLSQDILQV | 967 | ADIG | ENSG00000182035 | Adipogenin |
| 1138 | HLA-A*30:02_GQHGSGSSYSY | 968 | HORN | ENSG00000197915 | Hornerin |
| 1139 | HLA-B*44:02_AEDFKIQNW | 969 | CP096 | ENSG00000205832 | Uncharacterized protein C16orf96 |
| 1140 | HLA-A*26:01_EIYEILSPSY | 970 | CP096 | ENSG00000205832 | Uncharacterized protein C16orf96 |
| 1141 | HLA-A*26:01_EVASLQNKF | 971 | CP096 | ENSG00000205832 | Uncharacterized protein C16orf96 |
| 1142 | HLA-A*11:01_GTTVDILQK | 972 | CP096 | ENSG00000205832 | Uncharacterized protein C16orf96 |
| 1143 | HLA-B*35:01_IAAAAAAAY | 973 | CP096 | ENSG00000205832 | Uncharacterized protein C16orf96 |
| 1144 | HLA-A*02:07_LLPPLIPSL | 974 | CP096 | ENSG00000205832 | Uncharacterized protein C16orf96 |
| 1145 | HLA-B*35:01_YPYGDPHVIDY | 975 | CP096 | ENSG00000205832 | Uncharacterized protein C16orf196 |
| 1146 | HLA-B*51:01_YPYGDPHVI | 976 | CP096 | ENSG00000205832 | Uncharacterized protein C16orf96 |
| 1147 | HLA-A*29:02_YFAQVKHLY | 943 | TPTE | ENSG00000274391 | Putative tyrosine-protein phosphatase TPTE (EC |
| | | | | | 3.1.3.48)(Cancer/testis antigen 44)(CT44) |
| | | | | | (Transmembrane phosphatase with tensin |
| | | | | | homology)(Tumor antigen BJ-HCC-5) |
| 1148 | HLA-A*11:01_RSYSPAPGK | 977 | NOBOX | ENSG00000106410 | Homeobox protein NOBOX |
| 1149 | HLA-A*30:02_AQKNTFVSY | 978 | CCD62 | ENSG00000130783 | Coiled-coil domain-containing protein 62 |
| | | | | | (Protein TSP-NY)(Protein aaa) |
| 1150 | HLA-A*02:01_TLSNTLVEL | 979 | CCD62 | ENSG00000130783 | Coiled-coil domain-containing protein 62 |
| | | | | | (Protein TSP-NY)(Protein aaa) |
| 1151 | HLA-A*03:01_RVWNMTATRPK | 980 | FATE1 | ENSG00000147378 | Fetal and adult testis-expressed transcript protein |
| | | | | | (Cancer/testis antigen 43)(CT43)(Tumor antigen |
| | | | | | BJ-HCC-2) |
| 1152 | HLA-B*35:01_LPNTVTDAL | 981 | TERT | ENSG00000164362 | Telomerase reverse transcriptase (EC 2.7.7.49) |
| | | | | | (HEST2)(Telomerase catalytic subunit) |
| | | | | | (Telomerase-associated protein 2)(TP2) |
| 1153 | HLA-A*29:02_YLLGWTTFLLY | 982 | ESPB1 | ENSG00000169393 | Epididymal sperm-binding protein 1 (Epididymal |
| | | | | | secretory protein 12)(hE12) |
| 1154 | HLA-A*03:01_RIFEKYAAK | 983 | S100G | ENSG00000169906 | Protein S100-G (Calbindin-D9k)(S100 calcium- |
| | | | | | binding protein G)(Vitamin D-dependent |
| | | | | | calcium-binding protein, intestinal)(CABP) |
| 1155 | HLA-B*35:01_FPTEVTYTL | 984 | HSF5 | ENSG00000176160 | Heat shock factor protein 5 (HSF 5)(Heat shock |
| | | | | | transcription factor 5)(HSTF 5) |
| 1156 | HLA-B*35:01_NPSPSSVVF | 985 | HSF5 | ENSG00000176160 | Heat shock factor proteins (HSF 5)(Heat shock |
| | | | | | transcription factor 5)(HSTF 5) |
| 1157 | HLA-A*02:07_KVLEFVAKV | 986 | MAGBG | ENSG00000189023 | Melanoma-associated antigen B16 (MAGE-B16 |
| | | | | | antigen) |
| 1158 | HLA-A*11:01_SSSEQSPLQK | 987 | FOXR2 | ENSG00000189299 | Forkhead box protein R2 (Forkhead box protein |
| | | | | | N6) |
| 1159 | HLA-B*44:02_EEFSLQKSY | 496 | E5RK72 | ENSG00000215262 | Potassium channel subfamily U member 1 |
| 1160 | HLA-A*03:01_SVIGGPSTYK | 419 | ERVV2 | ENSG00000268964 | Endogenous retrovims group V member 2 Env |
| | | | | | polyprotein (HERV-V_19q13.41 provirus |
| | | | | | ancestral Env polyprotein 2) |
| 1161 | HLA-A*26:01_SVIGGPSTY | 988 | ERVV2 | ENSG00000268964 | Endogenous retrovirus group V member 2 Env |
| | | | | | polyprotein (HERV-V_19q13.41 provirus |
| | | | | | ancestral Env polyprotein 2) |
| 1162 | HLA-A*26:01_EIKGTVTEF | 989 | TDRD1 | ENSG00000095627 | Tudor domain-containing protein 1 (Cancer/testis |
| | | | | | antigen 41.1)(CT41.1) |
| 1163 | HLA-A*02:07_LLDHVLIEM | 990 | TDRD1 | ENSG00000095627 | Tudor domain-containing protein 1 (Cancer/testis |
| | | | | | antigen 41.1)(CT41.1) |
| 1164 | HLA-B*44:03_AEQQPQPQF | 653 | MORC1 | ENSG00000114487 | MORC family CW-type zinc finger protein 1 |
| | | | | | (Cancer/testis antigen 33)(CT33) |
| 1165 | HLA-A*30:02_STLPFQSAKY | 991 | OPRD | ENSG00000116329 | Delta-type opioid receptor (D-OR-1)(DOR-1) |
| 1166 | HLA-A*26:01_EVNPTTHSY | 992 | MAGB4 | ENSG00000120289 | Melanoma-associated antigen B4 (MAGE-B4 |
| | | | | | antigen) |
| 1167 | HLA-A*30:02_EVNPTTHSY | 992 | MAGB4 | ENSG00000120289 | Melanoma-associated antigen B4 (MAGE-B4 |
| | | | | | antigen) |
| 1168 | HLA-A*30:02_AAAAAAAAATY | 993 | NKX24 | ENSG00000125816 | Homeobox protein Nkx-2.4 (Homeobox protein |
| | | | | | NK-2 homolog D) |
| 1169 | HLA-A*02:01_FLITGIVQV | 994 | GP119 | ENSG00000147262 | Glucose-dependent insulinotropic receptor (G- |
| | | | | | protein coupled receptor 119) |
| 1170 | HLA-A*02:07_ALDVEFYTL | 995 | SL9C2 | ENSG00000162753 | Sodium/hydrogen exchanger 11 (Na(+)/H(+) |
| | | | | | exchanger 11)(NHE-11)(Solute carrier family 9 |
| | | | | | member 11)(Solute carrier family 9 member C2) |
| 1171 | HLA-C*04:01_IYDVSTYM | 996 | SL9C2 | ENSG00000162753 | Sodium/hydrogen exchanger 11 (Na(-9/H(+) |
| | | | | | exchanger 11)(NHE-11)(Solute carrier family 9 |
| | | | | | member 11)(Solute carrier family 9 member C2) |
| 1172 | HLA-B*51:01_LAYHVQNEI | 997 | TERB2 | ENSG00000167014 | Telomere repeats-binding bouquet formation |
| | | | | | protein 2 |
| 1173 | HLA-A*26:01_FTSSQVQRY | 998 | SL9C1 | ENSG00000172139 | Sodium/hydrogen exchanger 10 (Na(+)/H(+) |
| | | | | | exchanger 10)(NHE-10)(Solute carrier family 9 |
| | | | | | member 10)(Solute carrier family 9 member CO |
| | | | | | (Sperm-specific Na(+)/H(+) exchanger)(sNHE) |
| 1174 | HLA-A*26:01_EVFPQSHHF | 999 | ATS20 | ENSG00000173157 | A disintegrin and metalloproteinase with |
| | | | | | thrombospondin motifs 20 (ADAM-TS 20) |
| | | | | | (ADAM-TS20)(ADAMTS-20)(EC 3.4.24.-) |
| 1175 | HLA-B*35:01_SAWETITIY | 1000 | MC5R | ENSG00000176136 | Melanocortin receptor 5 (MCS-R)(MC-2) |
| 1176 | HLA-A*26:01_EIYGGHHSAF | 1001 | OLIG3 | ENSG00000177468 | Oligodendrocyte transcription factor 3 (01ig03) |
| | | | | | (Class B basic helix-loop-helix protein 7) |
| | | | | | (bHLHb7)(Class E basic helix-loop-helix protein |
| | | | | | 20)(bHLHe20) |
| 1177 | HLA-B*35:01_YPAPLESLDY | 1002 | PRA10 | ENSG00000187545 | PRAME family member 10 |
| 1178 | HLA-C*02:02_AEVGGVFASL | 1003 | FGF16 | ENSG00000196468 | Fibroblast growth factor 16 (FGF-16) |
| 1179 | HLA-B*44:03_AEAITAPLF | 827 | RHF2B | ENSG00000203989 | Rhox homeobox family member 2B |
| 1180 | HLA-C*02:02_AEAITAPLF | 827 | RHF2B | ENSG00000203989 | Rhox homeobox family member 2B |
| 1181 | HLA-A*31:01_AVQIWFENR | 828 | RHF2B | ENSG00000203989 | Rhox homeobox family member 2B |
| 1182 | HLA-A*02:07_IVPSFTFPNV | 829 | RHF2B | ENSG00000203989 | Rhox homeobox family member 2B |
| 1183 | HLA-A*01:01_QSEKEPGQQY | 830 | RHF2B | ENSG00000203989 | Rhox homeobox family member 2B |
| 1184 | HLA-B*44:03_SEKEPGQQY | 831 | RHF2B | ENSG00000203989 | Rhox homeobox family member 2B |
| 1185 | HLA-C*02:02_SEKEPGQQY | 831 | RHF2B | ENSG00000203989 | Rhox homeobox family member 2B |
| 1186 | HLA-A*03:01_GVLNQPGILK | 1004 | A0A1B0GUY1 | ENSG00000248109 | Uncharacterized protein |
| 1187 | HLA-B*35:01_LPAALSSEQM | 1005 | NMUR2 | ENSG00000132911 | Neuromedin-U receptor 2 (NMU-R2)(G-protein |
| | | | | | coupled receptor FM-4)(G-protein coupled |
| | | | | | receptor TGR-1) |
| 1188 | HLA-B*44:03_EEAQLAIRI | 1006 | RBM46 | ENSG00000151962 | Probable RNA-binding protein 46 (Cancer/testis |
| | | | | | antigen 68)(CT68)(RNA-binding motif protein |
| | | | | | 46) |
| 1189 | HLA-B*18:01_DEADFSEHTTY | 1007 | Q5T1N2 | ENSG00000162641 | Protein AKNAD1 |
| 1190 | HLA-A*03:01_KSYQGQSPQK | 859 | Q5T1N2 | ENSG00000162641 | Protein AKNAD 1 |
| 1191 | HLA-B*18:01_SEKIVYVY | 1008 | SSX3 | ENSG00000165584 | Protein SSX3 (Cancer/testis antigen 5.3)(CT5.3) |
| 1192 | HLA-A*26:01_ETPTSRQLSEY | 1009 | PERL | ENSG00000167419 | Lactoperoxidase (LPO)(EC 1.11.1.7)(Salivary |
| | | | | | peroxidase)(SPO) |
| 1193 | HLA-B*51:01_NPYFQNKVI | 965 | C9JPU3 | ENSG00000168757 | Testis-specific Y-encoded protein 2 |
| 1194 | HLA-B*44:03_QEINTKSAF | 744 | GPC6A | ENSG00000173612 | G-protein coupled receptor family C group 6 |
| | | | | | member A (hGPRC6A)(G-protein coupled |
| | | | | | receptor GPCR33)(hGPCR33) |
| 1195 | HLA-A*11:01_ASEDNLTSLLK | 1010 | KCNH7 | ENSG00000184611 | Potassium voltage-gated channel subfamily H |
| | | | | | member 7 (Ether-a-go-go-related gene potassium |
| | | | | | channel 3)(ERG-3)(Eag-related protein 3) |
| | | | | | (Ether-a-go-go-related protein 3)(hERG-3) |
| | | | | | (Voltage-gated potassium channel subunit |
| | | | | | Kv11.3) |
| 1196 | HLA-A*02:01_FLYHDSTDIGL | 1011 | ADAM7 | ENSG00000069206 | Disintegrin and metalloproteinase domain- |
| | | | | | containing protein 7 (ADAM 7)(Sperm |
| | | | | | maturation-related glycoprotein GP-83) |
| 1197 | HLA-B*51:01_MPMSEVSQV | 1012 | U3KQD4 | ENSG00000105549 | Testicular haploid-expressed gene protein (Theg |
| | | | | | homolog (Mouse), isoform CRA_a) |
| 1198 | HLA-A*02:01_TLTITVPAV | 1013 | U3KQD4 | ENSG00000105549 | Testicular haploid-expressed gene protein (Theg |
| | | | | | homolog (Mouse), isoform CRA_a) |
| 1199 | HLA-A*30:02_ISNPLLIGRY | 1014 | TTLL2 | ENSG00000120440 | Probable tubulin polyglutamylase TTLL2 (EC 6.- |
| | | | | | .-.-)(Testis-specific protein NYD-TSPG) |
| | | | | | (Tubulin--tyro sine ligase-like protein 2) |
| 1200 | HLA-A*24:02_KYISNPLLI | 1015 | TTLL2 | ENSG00000120440 | Probable tubulin polyglutamylase TTLL2 (EC 6.- |
| | | | | | .-.-)(Testis-specific protein NYD-TSPG) |
| | | | | | (Tubulin--tyro sine ligase-like protein 2) |
| 1201 | HLA-A*24:02_VYQEGLVRF | 1016 | TTLL2 | ENSG00000120440 | Probable tubulin polyglutamylase TTLL2 (EC 6.- |
| | | | | | .-.-)(Testis-specific protein NYD-TSPG) |
| | | | | | (Tubulin--tyro sine ligase-like protein 2) |
| 1202 | HLA-C*16:01_AAAAAGLAY | 646 | BHE23 | ENSG00000125533 | Class E basic helix-loop-helix protein 23 |
| | | | | | (bHLHe23)(Class B basic helix-loop-helix |
| | | | | | protein 4)(bHLHb4) |
| 1203 | HLA-C*16:01_AAAAAAATY | 372 | NKX24 | ENSG00000125816 | Homeobox protein Nkx-2.4 (Homeobox protein |
| | | | | | NK-2 homolog D) |
| 1204 | HLA-A*29:02_GVLGANLLY | 1017 | NKX24 | ENSG00000125816 | Homeobox protein Nkx-2.4 (Homeobox protein |
| | | | | | NK-2 homolog D) |
| 1205 | HLA-C*02:02_IEAGTSESY | 276 | SUN3 | ENSG00000164744 | SUN domain-containing protein 3 (Sad1/unc-84 |
| | | | | | domain-containing protein 1) |
| 1206 | HLA-A*11:01_TTYTGSYRK | 1018 | CD051 | ENSG00000237136 | Uncharacterized protein C4orf51 |
| 1207 | HLA-A*02:07_LLDGQWHHI | 1019 | PTX4 | ENSG00000251692 | Pentraxin-4 |
| 1208 | HLA-B*35:01_LPNENFQSLY | 1020 | RNF17 | ENSG00000132972 | RING finger protein 17 (Tudor domain- |
| | | | | | containing protein 4) |
| 1209 | HLA-B*44:02_EEDVWVIIHLY | 761 | PDCL2 | ENSG00000163440 | Phosducin-like protein 2 |
| 1210 | HLA-B*35:01_TATSTGQLY | 1021 | CP2AD | ENSG00000197838 | Cytochrome P450 2A13 (EC 1.14.14.1) |
| | | | | | (CYPIIA13) |
| 1211 | HLA-B*44:02_SEKEPGQQY | 831 | RHF2B | ENSG00000203989 | Rhox homeobox family member 2B |
| 1212 | HLA-B*51:01_MPAAAALI | 1022 | DYTN | ENSG00000232125 | Dystrotelin |
| 1213 | HLA-A*24:02_KYLYVTSSF | 1023 | MORC1 | ENSG00000114487 | MORC family CW-type zinc finger protein 1 |
| | | | | | (Cancer/testis antigen 33)(CT33) |
| 1214 | HLA-A*03:01_GTMKIHILQK | 112 | V9GZ46 | ENSG00000124092 | Transcriptional repressor CTCFL |
| 1215 | HLA-A*03:01_SSYVPIFEK | 620 | DDX4 | ENSG00000152670 | Probable ATP-dependent RNA helicase DDX4 |
| | | | | | (EC 3.6.4.13)(DEAD box protein 4)(Vasa |
| | | | | | homolog) |
| 1216 | HLA-B*35:01_MPFAISTSL | 1024 | S7A13 | ENSG00000164893 | Solute carrier family 7 member 13 (Sodium- |
| | | | | | independent aspartate/glutamate transporter 1) |
| | | | | | (X-amino acid transporter 2) |
| 1217 | HLA-B*44:03_EEASVYSQW | 1025 | WDR87 | ENSG00000171804 | WD repeat-containing protein 87 (Testis |
| | | | | | development protein NYD-SP11) |
| 1218 | HLA-C*02:02_EEASVYSQW | 1025 | WDR87 | ENSG00000171804 | WD repeat-containing protein 87 (Testis |
| | | | | | development protein NYD-SP11) |
| 1219 | HLA-A*02:01_RLWPEGTPIYL | 1026 | WDR87 | ENSG00000171804 | WD repeat-containing protein 87 (Testis |
| | | | | | development protein NYD-SP11) |
| 1220 | HLA-A*02:07_VLDGVKVQL | 1027 | WDR87 | ENSG00000171804 | WD repeat-containing protein 87 (Testis |
| | | | | | development protein NYD-SP11) |
| 1221 | HLA-A*11:01_VTQEVIRFIK | 1028 | WDR87 | ENSG00000171804 | WD repeat-containing protein 87 (Testis |
| | | | | | development protein NYD-SP11) |
| 1222 | HLA-A*02:01_FLSDNTIEV | 1029 | GPC6A | ENSG00000173612 | G-protein coupled receptor family C group 6 |
| | | | | | member A (hGPRC6A)(G-protein coupled |
| | | | | | receptor GPCR33)(hGPCR33) |
| 1223 | HLA-A*24:02_NYNEAKFITF | 1030 | GPC6A | ENSG00000173612 | G-protein coupled receptor family C group 6 |
| | | | | | member A (hGPRC6A)(G-protein coupled |
| | | | | | receptor GPCR33)(hGPCR33) |
| 1224 | HLA-B*18:01_VEWEVHGM | 1031 | ACHA9 | ENSG00000174343 | Neuronal acetylcholine receptor subunit alpha-9 |
| | | | | | (Nicotinic acetylcholine receptor subunit alpha-9) |
| | | | | | (NACHR alpha-9) |
| 1225 | HLA-B*44:02_KEGEPVEFIF | 241 | LN28B | ENSG00000187772 | Protein lin-28 homolog B (Lin-28B) |
| 1226 | HLA-B*44:02_AESPLEVPQSF | 626 | MAGBG | ENSG00000189023 | Melanoma-associated antigen B16 (MAGE-B16 |
| | | | | | antigen) |
| 1227 | HLA-A*31:01_TTLGIDYVNPR | 1032 | GNAT3 | ENSG00000214415 | Guanine nucleotide-binding protein G(t) subunit |
| | | | | | alpha-3 (Gustducin alpha-3 chain) |
| 1228 | HLA-A*03:01_HVSPSPLIY | 432 | TIFAB | ENSG00000255833 | TRAP-interacting protein with FHA domain- |
| | | | | | containing protein B (TWA-like protein) |
| 1229 | HLA-A*24:02_NYTDFSGSSF | 1033 | TSN16 | ENSG00000130167 | Tetraspanin-16 (Tspan-16)(Tetraspanin TM4-B) |
| | | | | | (Transmembrane 4 supetfamily member 16) |
| 1230 | HLA-B*18:01_YEAFLSPEY | 1034 | PPAT | ENSG00000142513 | Testicular acid phosphatase (EC 3.1.3.2) |
| 1231 | HLA-A*02:01_ALAAVDIAV | 1035 | PO4F1 | ENSG00000152192 | POU domain, class 4, transcription factor 1 |
| | | | | | (Brain-specific homeobox/POU domain protein |
| | | | | | 3A)(Brain-3A)(Brn-3A)(Homeobox/POU |
| | | | | | domain protein RDC-1)(Oct-T1) |
| 1232 | HLA-B*18:01_DENLIYVI | 1036 | SL9C1 | ENSG00000172139 | Sodium/hydrogen exchanger 10 (Na(+)/H(+) |
| | | | | | exchanger 10)(NHE-10)(Solute carrier family 9 |
| | | | | | member 10)(Solute carrier family 9 member Cl) |
| | | | | | (Sperm-specific Na(+)/H(+) exchanger)(sNHE) |
| 1233 | HLA-A*31:01_QVKIWFQNR | 110 | NKX26 | ENSG00000180053 | Homeobox protein Nkx-2.6 (Homeobox protein |
| | | | | | NK-2 homolog F) |
| 1234 | HLA-B*44:02_GEYPDYQQW | 604 | CRGB | ENSG00000182187 | Gamma-crystallin B (Gamma-B-crystallin) |
| | | | | | (Gamma-crystallin 1-2) |
| 1235 | HLA-A*11:01_AVHNEDKLMAK | 1037 | D7UEQ8 | ENSG00000183206 | POTE ankyrin domain family member C |
| 1236 | HLA-A*31:01_AVKKPFDLR | 1038 | D7UEQ8 | ENSG00000183206 | POTE ankyrin domain family member C |
| 1237 | HLA-B*18:01_DEYGNTTLHY | 1039 | D7UEQ8 | ENSG00000183206 | POTE ankyrin domain family member C |
| 1238 | HLA-A*11:01_ISQDEILTNK | 1040 | D7UEQ8 | ENSG00000183206 | POTE ankyrin domain family member C |
| 1239 | HLA-B*18:01_LEEEVTTY | 1041 | RTP2 | ENSG00000198471 | Receptor-transporting protein 2 (3CxxC-type zinc |
| | | | | | finger protein 2) |
| 1240 | HLA-A*02:07_LVDNLITSL | 1042 | RTP2 | ENSG00000198471 | Receptor-transporting protein 2 (3CxxC-type zinc |
| | | | | | finger protein 2) |
| 1241 | HLA-C*16:01_AAVSDPRVY | 1043 | A0A0U1RRI6 | ENSG00000224109 | Centromere protein V-like 3 |
| 1242 | HLA-A*11:01_ATLENLLSH | 1044 | PRAM4 | ENSG00000243073 | PRAME family member 4 |
| 1243 | HLA-A*30:02_TVNKLNHAY | 1045 | A0A1B0GW35 | ENSG00000250821 | HCG2040572 |
| 1244 | HLA-A*01:01_QSEQSSVRY | 1046 | SACA1 | ENSG00000118434 | Sperm acrosome membrane-associated protein 1 |
| | | | | | (Sperm acrosomal membrane-associated protein |
| | | | | | 32) |
| 1245 | HLA-A*29:02_ILSPIEETY | 1047 | NKX24 | ENSG00000125816 | Homeobox protein Nkx-2.4 (Homeobox protein |
| | | | | | NK-2 homolog D) |
| 1246 | HLA-A*02:01_GLLSDLVYL | 1048 | LRC52 | ENSG00000162763 | Leucine-rich repeat-containing protein 52 (BK |
| | | | | | channel auxiliary gamma subunit LRRC52) |
| 1247 | HLA-A*11:01_GTNGFQLLR | 1049 | A0A0B41218 | ENSG00000164871, | Sperm-associated antigen 11A (Sperm-associated |
| | | | | ENSG00000178287 | antigen 11B)(Fragment) |
| 1248 | HLA-A*11:01_GTNGFQLLR | 1049 | SG11B | ENSG00000164871 | Sperm-associated antigen 11B (Human |
| | | | | | epididymis-specific protein 2)(He2)(Protein |
| | | | | | EP2)(Sperm antigen HE2) |
| 1249 | HLA-A*02:07_LLPPRTPPYQV | 1050 | SG11B | ENSG00000164871 | Sperm-associated antigen 11B (Human |
| | | | | | epididymis-specific protein 2)(He2)(Protein |
| | | | | | EP2)(Sperm antigen HE2) |
| 1250 | HLA-B*51:01_VPPGIRNTI | 1051 | SG11B | ENSG00000164871 | Sperm-associated antigen 11B (Human |
| | | | | | epididymis-specific protein 2)(He2)(Protein |
| | | | | | EP2)(Sperm antigen HE2) |
| 1251 | HLA-B*35:01_VPSYPGNTY | 1052 | PRR27 | ENSG00000187533 | Proline-rich protein 27 |
| 1252 | HLA-A*30:02_RLLPPVSGGY | 1053 | CP26C | ENSG00000187553 | Cytochrome P450 26C1 (EC 1.14.-.-) |
| 1253 | HLA-B*51:01_YPISPKVI | 1054 | M4A18 | ENSG00000214782 | Membrane-spanning 4-domains subfamily A |
| | | | | | member 18 |
| 1254 | HLA-A*11:01_GVLNQPGILK | 1004 | A0A1B0GUY1 | ENSG00000248109 | Uncharacterized protein |
| 1255 | HLA-C*02:02_AAAAAAATY | 372 | NKX24 | ENSG00000125816 | Homeobox protein Nkx-2.4 (Homeobox protein |
| | | | | | NK-2 homolog D) |
| 1256 | HLA-B*51:01_DAWLFGALV | 1055 | GALR3 | ENSG00000128310 | Galanin receptor type 3 (GAL3-R)(GALR-3) |
| 1257 | HLA-A*26:01_DVATFAAGY | 1056 | GALR3 | ENSG00000128310 | Galanin receptor type 3 (GAL3-R)(GALR-3) |
| 1258 | HLA-A*02:01_QLWGHTIQV | 1057 | RBM46 | ENSG00000151962 | Probable RNA-binding protein 46 (Cancer/testis |
| | | | | | antigen 68)(CT68)(RNA-binding motif protein |
| | | | | | 46) |
| 1259 | HLA-A*02:01_SLSPVSATL | 1058 | RBM46 | ENSG00000151962 | Probable RNA-binding protein 46 (Cancer/testis |
| | | | | | antigen 68)(CT68)(RNA-binding motif protein |
| | | | | | 46) |
| 1260 | HLA-B*08:01_DLVQRNVSI | 1059 | LDH6A | ENSG00000166800 | L-lactate dehydrogenase A-like 6A (EC 1.1.1.27) |
| 1261 | HLA-A*11:01_GSIDDGNFQK | 1060 | ADA18 | ENSG00000168619 | Disintegrin and metalloproteinase domain- |
| | | | | | containing protein 18 (ADAM 18) |
| | | | | | (Transmembrane metalloproteinase-like, |
| | | | | | disintegrin-like, and cysteine-rich protein III) |
| | | | | | (tMDC III) |
| 1262 | HLA-A*11:01_KAMAHLIQK | 1061 | GPC6A | ENSG00000173612 | G-protein coupled receptor family C group 6 |
| | | | | | member A (hGPRC6A)(G-protein coupled |
| | | | | | receptor GPCR33)(hGPCR33) |
| 1263 | HLA-A*03:01_RLSAESKDLLK | 1062 | OLIG3 | ENSG00000177468 | Oligodendrocyte transcription factor 3 (01ig03) |
| | | | | | (Class B basic helix-loop-helix protein 7) |
| | | | | | (bHLHb7)(Class E basic helix-loop-helix protein |
| | | | | | 20)(bHLHe20) |
| 1264 | HLA-B*35:01_QPLLHVTAY | 1063 | CH086 | ENSG00000196166 | Uncharacterized protein C8orf86 |
| 1265 | HLA-A*02:07_ALDNIVTQF | 1064 | CD022 | ENSG00000197826 | Uncharacterized protein C4orf22 |
| 1266 | HLA-A*02:01_FLDSQITTV | 1065 | CD022 | ENSG00000197826 | Uncharacterized protein C4orf22 |
| 1267 | HLA-A*02:07_FLDSQITTV | 1065 | CD022 | ENSG00000197826 | Uncharacterized protein C4orf22 |
| 1268 | HLA-A*30:02_SSSGLSSSY | 1066 | HORN | ENSG00000197915 | Hornerin |
| 1269 | HLA-B*51:01_LPPLIPSL | 1067 | CP096 | ENSG00000205832 | Uncharacterized protein Cl6orf96 |
| 1270 | HLA-B*51:01_DALKQSLVV | 1068 | PCDG8 | ENSG00000253767 | Protocadherin gamma-A8 (PCDH-gamma-A8) |
| 1271 | HLA-B*44:03_EEVQAFLQTY | 1069 | PCDG8 | ENSG00000253767 | Protocadherin gamma-A8 (PCDH-gamma-A8) |
| 1272 | HLA-A*30:02_GTMGLSARY | 1070 | PCDG8 | ENSG00000253767 | Protocadherin gamma-A8 (PCDH-gamma-A8) |
| 1273 | HLA-A*02:01_YLVTKVVAV | 1071 | PCDG8 | ENSG00000253767 | Protocadherin gamma-A8 (PCDH-gamma-A8) |
| 1274 | HLA-B*44:03_DETEIRSFF | 589 | DAZL | ENSG00000092345 | Deleted in azoospermia-like (DAZ homolog) |
| | | | | | (DAZ-like autosomal)(Deleted in azoospermia- |
| | | | | | like 1)(SPGY-like-autosomal) |
| 1275 | HLA-B*51:01_IPPSFVKMV | 1072 | PP13 | ENSG00000105198 | Galactoside-binding soluble lectin 13 (Galectin- |
| | | | | | 13)(Ga1-13)(Placental tissue protein 13)(PP13) |
| | | | | | (Placental protein 13) |
| 1276 | HLA-A*03:01_RLGPLTTSH | 1073 | APOL5 | ENSG00000128313 | Apolipoprotein L5 (Apolipoprotein L-V)(ApoL- |
| | | | | | V) |
| 1277 | HLA-A*01:01_VTDTLVEVLLY | 1074 | RNF17 | ENSG00000132972 | RING finger protein 17 (Tudor domain- |
| | | | | | containing protein 4) |
| 1278 | HLA-A*24:02_EYAGNFQGI | 1075 | FATE1 | ENSG00000147378 | Fetal and adult testis-expressed transcript protein |
| | | | | | (Cancer/testis antigen 43)(CT43)(Tumor antigen |
| | | | | | BJ-HCC-2) |
| 1279 | HLA-B*51:01_DSYVFVNTL | 1076 | MAGC1 | ENSG00000155495 | Melanoma-associated antigen C1 (Cancer/testis |
| | | | | | antigen 7.1)(CT7.1)(MAGE-C1 antigen) |
| 1280 | HLA-A*24:02_LYLPEPFKI | 1077 | CC049 | ENSG00000163632 | Putative uncharacterized protein C3orf49 |
| 1281 | HLA-A*02:07_YLPEPFKIA | 1078 | CC049 | ENSG00000163632 | Putative uncharacterized protein C3orf49 |
| 1282 | HLA-B*46:01_MVILGVTSF | 1079 | ZPLD1 | ENSG00000170044 | Zona pellucida-like domain-containing protein 1 |
| | | | | | (ZP domain-containing protein 1) |
| 1283 | HLA-B*08:01_MPAVKNVI | 1080 | ACHA9 | ENSG00000174343 | Neuronal acetylcholine receptor subunit alpha-9 |
| | | | | | (Nicotinic acetylcholine receptor subunit alpha-9) |
| | | | | | (NACHR alpha-9) |
| 1284 | HLA-A*29:02_LLSLVGFVY | 1081 | NKAI3 | ENSG00000185942 | Sodium/potassium-transporting ATPase subunit |
| | | | | | beta-1-interacting protein 3 (Na(+)/K(+)- |
| | | | | | transporting ATPase subunit beta-1-interacting |
| | | | | | protein 3)(Protein FAM77D) |
| 1285 | HLA-C*02:02_AELTGGSEW | 1082 | C9J420 | ENSG00000186038 | 5-hydroxytryptamine receptor 3E (Fragment) |
| 1286 | HLA-A*29:02_IFIIITDLSLY | 1083 | M4A18 | ENSG00000214782 | Membrane-spanning 4-domains subfamily A |
| | | | | | member 18 |
| 1287 | HLA-C*02:02_SAINPVLYY | 1084 | M4A18 | ENSG00000214782 | Membrane-spanning 4-domains subfamily A |
| | | | | | member 18 |
| 1288 | HLA-A*30:02_RVAELINASY | 1085 | DC8L1 | ENSG00000226372 | DDB1-and CUL4-associated factor 8-like protein |
| | | | | | 1 (WD repeat-containing protein 42B) |
| 1289 | HLA-B*35:01_TAASSDIEM | 1086 | DC8L1 | ENSG00000226372 | DDB1-and CUL4-associated factor 8-like protein |
| | | | | | 1 (WD repeat-containing protein 42B) |
| 1290 | HLA-B*18:01_NEYFSTKY | 1087 | A14EL | ENSG00000268223 | ARL14 effector protein-like |
| 1291 | HLA-A*33:01_DTNIIANR | 1088 | ADAM7 | ENSG00000069206 | Disintegrin and metalloproteinase domain- |
| | | | | | containing protein 7 (ADAM 7)(Sperm |
| | | | | | maturation-related glycoprotein GP-83) |
| 1292 | HLA-A*11:01_QVASQEDILLK | 1089 | SMC1B | ENSG00000077935 | Structural maintenance of chromosomes protein |
| | | | | | 1B (SMC protein 1B)(SMC-1-beta)(SMC-1B) |
| 1293 | HLA-B*18:01_IEAIRAEY | 818 | TRI51 | ENSG00000124900 | Tripartite motif-containing protein 51 (SPRY |
| | | | | | domain-containing protein 5) |
| 1294 | HLA-A*01:01_VSDSTYYSSFY | 1090 | DMRT1 | ENSG00000137090 | Double sex-and mab-3-related transcription factor |
| | | | | | 1 (DM domain expressed in testis protein 1) |
| 1295 | HLA-A*02:01_FLGPATAHL | 1091 | X6R6V8 | ENSG00000143552 | Nuclear pore membrane glycoprotein 210-like |
| 1296 | HLA-A*24:02_IYSVRVVNF | 1092 | X6R6V8 | ENSG00000143552 | Nuclear pore membrane glycoprotein 210-like |
| 1297 | HLA-A*31:01_RVLPWADRTAR | 1093 | LGSN | ENSG00000146166 | Lengsin (Glutamate-ammonia ligase domain- |
| | | | | | containing protein 1)(Lens glutamine synthase- |
| | | | | | like) |
| 1298 | HLA-B*35:01_NPLGDIASL | 1094 | CG072 | ENSG00000164500 | Uncharacterized protein C7oif72 |
| 1299 | HLA-B*51:01_FPYVVLVI | 1095 | SC6A5 | ENSG00000165970 | Sodium-and chloride-dependent glycine |
| | | | | | transporter 2 (GlyT-2)(GlyT2)(Solute carrier |
| | | | | | family 6 member 5) |
| 1300 | HLA-A*02:07_GLPIFFLEV | 1096 | SC6A5 | ENSG00000165970 | Sodium-and chloride-dependent glycine |
| | | | | | transporter 2 (GlyT-2)(GlyT2)(Solute carrier |
| | | | | | family 6 member 5) |
| 1301 | HLA-B*51:01_TAYPNVTMV | 1097 | SC6A5 | ENSG00000165970 | Sodium-and chloride-dependent glycine |
| | | | | | transporter 2 (GlyT-2)(GlyT2)(Solute carrier |
| | | | | | family 6 member 5) |
| 1302 | HLA-B*51:01_WAFVTPTI | 1098 | SC6A5 | ENSG00000165970 | Sodium-and chloride-dependent glycine |
| | | | | | transporter 2 (GlyT-2)(GlyT2)(Solute carrier |
| | | | | | family 6 member 5) |
| 1303 | HLA-A*11:01_QTLEELNTVLK | 1099 | PERL | ENSG00000167419 | Lactoperoxidase (LPO)(EC 1.11.1.7)(Salivary |
| | | | | | peroxidase)(SPO) |
| 1304 | HLA-A*01:01_FTSSQVQRY | 998 | SL9C1 | ENSG00000172139 | Sodium/hydrogen exchanger 10 (Na(+)/H(+) |
| | | | | | exchanger 10)(NHE-10)(Solute carrier family 9 |
| | | | | | member 10)(Solute carrier family 9 member Cl) |
| | | | | | (Sperm-specific Na(+)/H(+) exchanger)(sNHE) |
| 1305 | HLA-C*02:02_AEAELTGGSEW | 843 | C9J420 | ENSG00000186038 | 5-hydroxytryptamine receptor 3E (Fragment) |
| 1306 | HLA-A*29:02_RNLPPPLYY | 1100 | PRR27 | ENSG00000187533 | Proline-rich protein 27 |
| 1307 | HLA-A*02:01_KVLEFVAKV | 986 | MAGBG | ENSG00000189023 | Melanoma-associated antigen B16 (MAGE-B16 |
| | | | | | antigen) |
| 1308 | HLA-B*35:01_FPTGAILTL | 1101 | PTX4 | ENSG00000251692 | Pentraxin-4 |
| 1309 | HLA-B*44:03_NEQESLLSRY | 1102 | TULP2 | ENSG00000104804 | Tubby-related protein 2 (Cancer/testis antigen 65) |
| | | | | | (CT65)(Tubby-like protein 2) |
| 1310 | HLA-B*51:01_DALLAQKV | 1103 | PRA12 | ENSG00000116726 | PRAME family member 12 |
| 1311 | HLA-B*44:03_SESDLKHLSW | 1104 | PRA12 | ENSG00000116726 | PRAME family member 12 |
| 1312 | HLA-A*11:01_ASQVPSHSPK | 1105 | ZSC10 | ENSG00000130182 | Zinc finger and SCAN domain-containing protein |
| | | | | | 10 (Zinc finger protein 206) |
| 1313 | HLA-B*27:02_LRNQLDQQF | 1106 | F71F1 | ENSG00000135248 | Protein FAM71F1 (Protein FAM137A)(Testis |
| | | | | | development protein NYD-SP18) |
| 1314 | HLA-A*02:01_ALADFMLSL | 1107 | GPR32 | ENSG00000142511 | Probable G-protein coupled receptor 32 |
| 1315 | HLA-A*29:02_YITFVFLSY | 1108 | GPR32 | ENSG00000142511 | Probable G-protein coupled receptor 32 |
| 1316 | HLA-A*11:01_STSTVPLAH | 1109 | PO4F1 | ENSG00000152192 | POU domain, class 4, transcription factor 1 |
| | | | | | (Brain-specific homeobox/POU domain protein |
| | | | | | 3A)(Brain-3A)(Brn-3A)(Homeobox/POU |
| | | | | | domain protein RDC-1)(Oct-T1) |
| 1317 | HLA-B*44:02_GEYPDYQQW | 604 | CRGC | ENSG00000163254 | Gamma-crystallin C (Gamma-C-crystallin) |
| | | | | | (Gamma-crystallin 2-1)(Gamma-crystallin 3) |
| 1318 | HLA-A*31:01_AVAVWVHVR | 1110 | CG033 | ENSG00000170279 | Uncharacterized protein C7orf33 |
| 1319 | HLA-A*29:02_SYLDLLTLSY | 1111 | CG033 | ENSG00000170279 | Uncharacterized protein C7orf33 |
| 1320 | HLA-A*01:01_YLDLLTLSY | 1112 | CG033 | ENSG00000170279 | Uncharacterized protein C7orf33 |
| 1321 | HLA-A*24:02_NYAPPVVKF | 1113 | V9GZ31 | ENSG00000177414 | Ubiquitin-conjugating enzyme E2 U (Fragment) |
| 1322 | HLA-A*02:07_GLPWRFEEL | 1114 | TEX19 | ENSG00000182459 | Testis-expressed protein 19 |
| 1323 | HLA-A*26:01_EVIAGLERF | 1115 | H9KVA5 | ENSG00000187959 | Putative cleavage and polyadenylation-specificity |
| | | | | | factor subunit 4-like protein |
| 1324 | HLA-B*35:01_FAFEKDVEM | 1116 | H9KVA5 | ENSG00000187959 | Putative cleavage and polyadenylation-specificity |
| | | | | | factor subunit 4-like protein |
| 1325 | HLA-A*26:01_EVASAVSAFGY | 1117 | 1A1L2 | ENSG00000205126 | Probable inactive 1-amino cyclopropane-1- |
| | | | | | carboxylate synthase-like protein 2 (ACC |
| | | | | | synthase-like protein 2) |
| 1326 | HLA-A*29:02_IFSAINPVLY | 1118 | M4A18 | ENSG00000214782 | Membrane-spanning 4-domains subfamily A |
| | | | | | member 18 |
| 1327 | HLA-A*29:02_SAINPVLYY | 1084 | M4A18 | ENSG00000214782 | Membrane-spanning 4-domains subfamily A |
| | | | | | member 18 |
| 1328 | HLA-A*26:01_EVYDEDPFAY | 1119 | E5RK72 | ENSG00000215262 | Potassium channel subfamily U member 1 |
| 1329 | HLA-B*18:01_TENIVAVM | 1120 | RN148 | ENSG00000235631 | RING finger protein 148 |
| 1330 | HLA-B*18:01_NENSLVSF | 1121 | ERVV2 | ENSG00000268964 | Endogenous retrovirus group V member 2 Env |
| | | | | | polyprotein (HERV-V_19q13.41 provirus |
| | | | | | ancestral Env polyprotein 2) |
| 1331 | HLA-A*02:07_VQDDTLHNV | 1122 | TRPC7 | ENSG00000069018 | Short transient receptor potential channel 7 |
| | | | | | (TrpC7)(Transient receptor protein 7)(TRP-7) |
| | | | | | (hTRP7) |
| 1332 | HLA-B*46:01_YSHVQGISY | 1123 | ADAM7 | ENSG00000069206 | Disintegrin and metalloproteinase domain- |
| | | | | | containing protein 7 (ADAM 7)(Sperm |
| | | | | | maturation-related glycoprotein GP-83) |
| 1333 | HLA-A*26:01_ESAGVMSVY | 1124 | CCG5 | ENSG00000075429 | Voltage-dependent calcium channel gamma-5 |
| | | | | | subunit (Neuronal voltage-gated calcium channel |
| | | | | | gamma-5 subunit)(Transmembrane AMPAR |
| | | | | | regulatory protein gamma-5)(TARP gamma-5) |
| 1334 | HLA-B*35:01_EPYLEGISY | 1125 | SMC1B | ENSG00000077935 | Structural maintenance of chromosomes protein |
| | | | | | 1B (SMC protein 1B)(SMC-1-beta)(SMC-1B) |
| 1335 | HLA-C*16:01_SASGPGLAF | 1126 | S6A18 | ENSG00000164363 | Sodium-dependent neutral amino acid transporter |
| | | | | | B(0)AT3 (Sodium-and chloride-dependent |
| | | | | | transporter XTRP2)(Solute carrier family 6 |
| | | | | | member 18)(System B(0) neutral amino acid |
| | | | | | transporter AT3) |
| 1336 | HLA-A*02:07_ILDVIGVKV | 1127 | ADA29 | ENSG00000168594 | Disintegrin and metalloproteinase domain- |
| | | | | | containing protein 29 (ADAM 29)(Cancer/testis |
| | | | | | antigen 73)(CT73) |
| 1337 | HLA-A*11:01_STLTVDIANK | 1128 | CTSRD | ENSG00000174898 | Cation channel sperm-associated protein subunit |
| | | | | | delta (CatSper-delta)(CatSperdelta) |
| | | | | | (Transmembrane protein 146) |
| 1338 | HLA-C*16:01_VVTGHQQSF | 1129 | DC4L2 | ENSG00000176566 | DDB1-and CUL4-associated factor 4-like protein |
| | | | | | 2 (WD repeat-containing protein 21C) |
| 1339 | HLA-B*44:03_QEVVGELVAKF | 1130 | TFDP3 | ENSG00000183434 | Transcription factor Dp family member 3 |
| | | | | | (Cancer/testis antigen 30)(CT30)(Hepatocellular |
| | | | | | carcinoma-associated antigen 661) |
| 1340 | HLA-B*35:01_LPGPQQQAF | 1131 | CP2AD | ENSG00000197838 | Cytochrome P450 2A13 (EC 1.14.14.1) |
| | | | | | (CYPIIA13) |
| 1341 | HLA-A*02:01_YLLEKIPLV | 806 | NTM1B | ENSG00000203740 | Alpha N-terminal protein methyltransferase 1B |
| | | | | | (EC 2.1.1.299)(Methyltransferase-like protein |
| | | | | | 11B)(X-Pro-Lys N-terminal protein |
| | | | | | methyltransferase 1B)(NTM1B) |
| 1342 | HLA-B*44:02_AENESVIIRL | 1132 | TDR15 | ENSG00000218819 | Tudor domain-containing protein 15 |
| 1343 | HLA-B*44:03_AENESVIIRL | 1132 | TDR15 | ENSG00000218819 | Tudor domain-containing protein 15 |
| 1344 | HLA-C*02:02_AENESVIIRL | 1132 | TDR15 | ENSG00000218819 | Tudor domain-containing protein 15 |
| 1345 | HLA-A*11:01_AILLQVIAK | 1133 | TDR15 | ENSG00000218819 | Tudor domain-containing protein 15 |
| 1346 | HLA-A*02:01_ALLGQVVYA | 1134 | TDR15 | ENSG00000218819 | Tudor domain-containing protein 15 |
| 1347 | HLA-A*26:01_AVITEINGY | 1135 | TDR15 | ENSG00000218819 | Tudor domain-containing protein 15 |
| 1348 | HLA-B*51:01_DARIFQLSI | 1136 | TDR15 | ENSG00000218819 | Tudor domain-containing protein 15 |
| 1349 | HLA-B*51:01_DPYEIGQTA | 1137 | TDR15 | ENSG00000218819 | Tudor domain-containing protein 15 |
| 1350 | HLA-A*26:01_DVISLMLQAGY | 1138 | TDR15 | ENSG00000218819 | Tudor domain-containing protein 15 |
| 1351 | HLA-B*44:03_EEVYISHIY | 1139 | TDR15 | ENSG00000218819 | Tudor domain-containing protein 15 |
| 1352 | HLA-A*01:01_EVDIVEVDY | 1140 | TDR15 | ENSG00000218819 | Tudor domain-containing protein 15 |
| 1353 | HLA-B*18:01_FEVEFIDY | 1141 | TDR15 | ENSG00000218819 | Tudor domain-containing protein 15 |
| 1354 | HLA-A*11:01_GSMNSNQQLFK | 1142 | TDR15 | ENSG00000218819 | Tudor domain-containing protein 15 |
| 1355 | HLA-B*35:01_IPTDSSSEF | 1143 | TDR15 | ENSG00000218819 | Tudor domain-containing protein 15 |
| 1356 | HLA-B*44:03_KEVDIVFVDY | 1144 | TDR15 | ENSG00000218819 | Tudor domain-containing protein 15 |
| 1357 | HLA-A*11:01_KTVDYFTSK | 1145 | TDR15 | ENSG00000218819 | Tudor domain-containing protein 15 |
| 1358 | HLA-A*24:02_KYVDDKVLVF | 1146 | TDR15 | ENSG00000218819 | Tudor domain-containing protein 15 |
| 1359 | HLA-B*51:01_LPKSLAVNI | 1147 | TDR15 | ENSG00000218819 | Tudor domain-containing protein 15 |
| 1360 | HLA-A*01:01_PTDSSSEFQVY | 1148 | TDR15 | ENSG00000218819 | Tudor domain-containing protein 15 |
| 1361 | HLA-B*35:01_QALLGQVVY | 1149 | TDR15 | ENSG00000218819 | Tudor domain-containing protein 15 |
| 1362 | HLA-A*11:01_QTQESTVNSK | 1150 | TDR15 | ENSG00000218819 | Tudor domain-containing protein 15 |
| 1363 | HLA-A*24:02_QYITLSETF | 1151 | TDR15 | ENSG00000218819 | Tudor domain-containing protein 15 |
| 1364 | HLA-A*02:01_RLAEIVYNI | 1152 | TDR15 | ENSG00000218819 | Tudor domain-containing protein 15 |
| 1365 | HLA-A*31:01_SAKEFLMNR | 1153 | TDR15 | ENSG00000218819 | Tudor domain-containing protein 15 |
| 1366 | HLA-B*44:03_SEFKNPFTL | 1154 | TDR15 | ENSG00000218819 | Tudor domain-containing protein 15 |
| 1367 | HLA-C*02:02_SEFKNPFTL | 1154 | TDR15 | ENSG00000218819 | Tudor domain-containing protein 15 |
| 1368 | HLA-C*02:02_SETSVSDVNSF | 1155 | TDR15 | ENSG00000218819 | Tudor domain-containing protein 15 |
| 1369 | HLA-A*03:01_SLNKKGILK | 1156 | TDR15 | ENSG00000218819 | Tudor domain-containing protein 15 |
| 1370 | HLA-A*11:01_SVNLQNFPK | 1157 | TDR15 | ENSG00000218819 | Tudor domain-containing protein 15 |
| 1371 | HLA-A*30:02_VINKPSPVTY | 1158 | TDR15 | ENSG00000218819 | Tudor domain-containing protein 15 |
| 1372 | HLA-A*02:07_VLDKLQPSL | 1159 | TDR15 | ENSG00000218819 | Tudor domain-containing protein 15 |
| 1373 | HLA-A*29:02_YGFSFYIRY | 1160 | TDR15 | ENSG00000218819 | Tudor domain-containing protein 15 |
| 1374 | HLA-B*08:01_YINEKIKVL | 1161 | TDR15 | ENSG00000218819 | Tudor domain-containing protein 15 |
| 1375 | HLA-A*02:07_YVDDKVLVFL | 1162 | TDR15 | ENSG00000218819 | Tudor domain-containing protein 15 |
| 1376 | HLA-A*02:07_YVDDKVLVF | 1163 | TDR15 | ENSG00000218819 | Tudor domain-containing protein 15 |
| 1377 | HLA-A*31:01_ATLQPRGITR | 1164 | V9GYR9 | ENSG00000225362 | Cancer/testis antigen 62 (Fragment) |
| 1378 | HLA-A*02:01_YLHEQVKTI | 1165 | FHL17 | ENSG00000132446 | Ferritin heavy polypeptide-like 17 (Cancer/testis |
| | | | | | antigen 38)(CT38) |
| 1379 | HLA-B*18:01_QEHLVIAEM | 1166 | FATE1 | ENSG00000147378 | Fetal and adult testis-expressed transcript protein |
| | | | | | (Cancer/testis antigen 43)(CT43)(Tumor antigen |
| | | | | | BJ-HCC-2) |
| 1380 | HLA-A*31:01_NGKQIYVGR | 83 | PABP3 | ENSG00000151846 | Polyadenylate-binding protein 3 (PABP-3) |
| | | | | | (Poly(A)-binding protein 3)(Testis-specific |
| | | | | | poly(A)-binding protein) |
| 1381 | HLA-B*35:01_AAASLFEVY | 1167 | OTOP1 | ENSG00000163982 | Otopetrin-1 |
| 1382 | HLA-A*30:02_ATIAVVVVY | 1168 | OTOP1 | ENSG00000163982 | Otopetrin-1 |
| 1383 | HLA-B*35:01_HAAASLFEVY | 1169 | OTOP1 | ENSG00000163982 | Otopetrin-1 |
| 1384 | HLA-B*51:01_LPYSILAI | 1170 | OTOP1 | ENSG00000163982 | Otopetrin-1 |
| 1385 | HLA-A*30:02_ASLDSITHRY | 1171 | CD045 | ENSG00000164123 | Uncharacterized protein C4orf45 |
| 1386 | HLA-A*30:02_ASNRSLPAKY | 1172 | CD045 | ENSG00000164123 | Uncharacterized protein C4orf45 |
| 1387 | HLA-B*35:01_TPDPPTIISY | 1173 | ZPLD1 | ENSG00000170044 | Zona pellucida-like domain-containing protein 1 |
| | | | | | (ZP domain-containing protein 1) |
| 1388 | HLA-A*03:01_ALYPALPKSGK | 1174 | GDPD4 | ENSG00000178795 | Glycerophosphodiester phosphodiesterase |
| | | | | | domain-containing protein 4 (EC 3.1.-.-) |
| | | | | | (Glycerophosphodiester phosphodiesterase 6) |
| | | | | | (UgPQ) |
| 1389 | HLA-B*44:03_LETDIHLSY | 642 | GDPD4 | ENSG00000178795 | Glycerophosphodiester phosphodiesterase |
| | | | | | domain-containing protein 4 (EC 3.1.-.-) |
| | | | | | (Glycerophosphodiester phosphodiesterase 6) |
| | | | | | (UgPQ) |
| 1390 | HLA-B*18:01_SEAGLTANQY | 472 | NAL11 | ENSG00000179873 | NACHT, LRR and PYD domains-containing |
| | | | | | protein 11 (Nucleotide-binding oligomerization |
| | | | | | domain protein 17)(PAAD-and NACHT domain- |
| | | | | | containing protein 10)(PYRIN-containing |
| | | | | | APAF1-like protein 6) |
| 1391 | HLA-A*33:01_DVFSPSHKTTR | 1175 | CL040 | ENSG00000180116 | Uncharacterized protein C12orf40 |
| 1392 | HLA-A*33:01_DYYPSSSER | 1176 | CL040 | ENSG00000180116 | Uncharacterized protein C12orf40 |
| 1393 | HLA-A*02:01_ILMEEGGIYSL | 1177 | CL040 | ENSG00000180116 | Uncharacterized protein C12orf40 |
| 1394 | HLA-A*01:01_STDEIRQSDY | 1178 | CL040 | ENSG00000180116 | Uncharacterized protein C12orf40 |
| 1395 | HLA-B*08:01_TLFERLNSL | 1179 | CL040 | ENSG00000180116 | Uncharacterized protein C12orf40 |
| 1396 | HLA-A*24:02_NYSPVTGKF | 1180 | OTOL1 | ENSG00000182447 | Otolin-1 |
| 1397 | HLA-A*02:07_TLDPADFFL | 1181 | OTOL1 | ENSG00000182447 | Otolin-1 |
| 1398 | HLA-B*44:03_AEIAINVHL | 1182 | CNGA2 | ENSG00000183862 | Cyclic nucleotide-gated olfactory channel (Cyclic |
| | | | | | nucleotide-gated cation channel 2)(Cyclic |
| | | | | | nucleotide-gated channel alpha-2)(CNG channel |
| | | | | | alpha-2)(CNG-2)(CNG2) |
| 1399 | HLA-C*02:02_AEIAINVHL | 1182 | CNGA2 | ENSG00000183862 | Cyclic nucleotide-gated olfactoty channel (Cyclic |
| | | | | | nucleotide-gated cation channel 2)(Cyclic |
| | | | | | nucleotide-gated channel alpha-2)(CNG channel |
| | | | | | alpha-2)(CNG-2)(CNG2) |
| 1400 | HLA-C*02:02_AEYTGAQQKL | 1183 | CNGA2 | ENSG00000183862 | Cyclic nucleotide-gated olfactoty channel (Cyclic |
| | | | | | nucleotide-gated cation channel 2)(Cyclic |
| | | | | | nucleotide-gated channel alpha-2)(CNG channel |
| | | | | | alpha-2)(CNG-2)(CNG2) |
| 1401 | HLA-A*03:01_AINVHLSTLK | 1184 | CNGA2 | ENSG00000183862 | Cyclic nucleotide-gated olfactoty channel (Cyclic |
| | | | | | nucleotide-gated cation channel 2)(Cyclic |
| | | | | | nucleotide-gated channel alpha-2)(CNG channel |
| | | | | | alpha-2)(CNG-2)(CNG2) |
| 1402 | HLA-B*18:01_DENEVATSM | 1185 | CNGA2 | ENSG00000183862 | Cyclic nucleotide-gated olfactoly channel (Cyclic |
| | | | | | nucleotide-gated cation channel 2)(Cyclic |
| | | | | | nucleotide-gated channel alpha-2)(CNG channel |
| | | | | | alpha-2)(CNG-2)(CNG2) |
| 1403 | HLA-A*01:01_FSDLQKGYY | 1186 | CNGA2 | ENSG00000183862 | Cyclic nucleotide-gated olfactoly channel (Cyclic |
| | | | | | nucleotide-gated cation channel 2)(Cyclic |
| | | | | | nucleotide-gated channel alpha-2)(CNG channel |
| | | | | | alpha-2)(CNG-2)(CNG2) |
| 1404 | HLA-B*44:03_MEVDVQEKL | 1187 | CNGA2 | ENSG00000183862 | Cyclic nucleotide-gated olfactoly channel (Cyclic |
| | | | | | nucleotide-gated cation channel 2)(Cyclic |
| | | | | | nucleotide-gated channel alpha-2)(CNG channel |
| | | | | | alpha-2)(CNG-2)(CNG2) |
| 1405 | HLA-A*01:01_VADDGVTQY | 1188 | CNGA2 | ENSG00000183862 | Cyclic nucleotide-gated olfactoty channel (Cyclic |
| | | | | | nucleotide-gated cation channel 2)(Cyclic |
| | | | | | nucleotide-gated channel alpha-2)(CNG channel |
| | | | | | alpha-2)(CNG-2)(CNG2) |
| 1406 | HLA-A*01:01_VLDPAGDWYY | 1189 | CNGA2 | ENSG00000183862 | Cyclic nucleotide-gated olfactoty channel (Cyclic |
| | | | | | nucleotide-gated cation channel 2)(Cyclic |
| | | | | | nucleotide-gated channel alpha-2)(CNG channel |
| | | | | | alpha-2)(CNG-2)(CNG2) |
| 1407 | HLA-B*35:01_YPNITDPEY | 1190 | CNGA2 | ENSG00000183862 | Cyclic nucleotide-gated olfactoty channel (Cyclic |
| | | | | | nucleotide-gated cation channel 2)(Cyclic |
| | | | | | nucleotide-gated channel alpha-2)(CNG channel |
| | | | | | alpha-2)(CNG-2)(CNG2) |
| 1408 | HLA-A*29:02_AFLTSTLLF | 1191 | PLET1 | ENSG00000188771 | Placenta-expressed transcript 1 protein |
| 1409 | HLA-B*18:01_DEYYTITL | 1192 | PLET1 | ENSG00000188771 | Placenta-expressed transcript 1 protein |
| 1410 | HLA-B*18:01_TEVEIQAF | 1193 | PLET1 | ENSG00000188771 | Placenta-expressed transcript 1 protein |
| 1411 | HLA-B*18:01_YENVAKVGF | 1194 | ZN560 | ENSG00000198028 | Zinc finger protein 560 |
| 1412 | HLA-C*02:02_AENQGLVLKF | 344 | A0A1B0GTN1 | ENSG00000224960 | Putative SMEK homolog 3 |
| 1413 | HLA-A*02:07_LLDDIMAEV | 711 | F2Z2I4 | ENSG00000228927, | Testis-specific Y-encoded protein 10 (Testis- |
| | | | | ENSG00000236424 | specific Y-encoded protein 3) |
| 1414 | HLA-A*02:07_LLDDIMAEV | 711 | TSPY3 | ENSG00000228927 | Testis-specific Y-encoded protein 3 |
| 1415 | HLA-A*01:01_ATEVSTWFY | 1195 | AT5L2 | ENSG00000249222 | ATP synthase subunit g 2, mitochondrial (ATPase |
| | | | | | subunit g 2) |
| 1416 | HLA-A*02:01_NLVEKTPAL | 1196 | AT5L2 | ENSG00000249222 | ATP synthase subunit g 2, mitochondrial (ATPase |
| | | | | | subunit g 2) |
| 1417 | HLA-B*35:01_TPALVNAAVTY | 1197 | AT5L2 | ENSG00000249222 | ATP synthase subunit g 2, mitochondrial (ATPase |
| | | | | | subunit g 2) |
| 1418 | HLA-A*02:07_ALDGISQVL | 1198 | PTTG2 | ENSG00000250254 | Securin-2 (Pituitary tumor-transforming gene 2 |
| | | | | | protein) |
| 1419 | HLA-B*35:01_DAYPEIEKF | 1199 | PTTG2 | ENSG00000250254 | Securin-2 (Pituitary tumor-transforming gene 2 |
| | | | | | protein) |
| 1420 | HLA-B*51:01_DAYPEIEKF | 1199 | PTTG2 | ENSG00000250254 | Securin-2 (Pituitary tumor-transforming gene 2 |
| | | | | | protein) |
| 1421 | HLA-B*44:03_EEGELEKLF | 1200 | PTTG2 | ENSG00000250254 | Securin-2 (Pituitary tumor-transforming gene 2 |
| | | | | | protein) |
| 1422 | HLA-A*03:01_KTYDAPSALPK | 1201 | PTTG2 | ENSG00000250254 | Securin-2 (Pituitary tumor-transforming gene 2 |
| | | | | | protein) |
| 1423 | HLA-A*11:01_KTYDAPSALPK | 1201 | PTTG2 | ENSG00000250254 | Securin-2 (Pituitary tumor-transforming gene 2 |
| | | | | | protein) |
| 1424 | HLA-A*29:02_SVYVGDALLY | 1202 | TRPC5 | ENSG00000072315 | Short transient receptor potential channel 5 |
| | | | | | (TipC5)(Transient receptor protein 5)(TRP-5) |
| | | | | | (hTRP-5)(hTRP5) |
| 1425 | HLA-A*02:07_EMFPKFTEV | 1203 | BRDT | ENSG00000137948 | Brodomain testis-specific protein |
| | | | | | (Cancer/testis antigen 9)(CT9)(RING3-like |
| | | | | | protein) |
| 1426 | HLA-A*11:01_AVVDGIQYK | 1204 | ADAD1 | ENSG00000164113 | Adenosine deaminase domain-containing protein |
| | | | | | 1 (Testis nuclear RNA-binding protein) |
| 1427 | HLA-A*33:01_DTHAVVTAR | 1205 | ADAD1 | ENSG00000164113 | Adenosine deaminase domain-containing protein |
| | | | | | 1 (Testis nuclear RNA-binding protein) |
| 1428 | HLA-A*26:01_EVVAIGTGEY | 1206 | ADAD1 | ENSG00000164113 | Adenosine deaminase domain-containing protein |
| | | | | | 1 (Testis nuclear RNA-binding protein) |
| 1429 | HLA-A*11:01_ISNPVLPPK | 1207 | ADAD1 | ENSG00000164113 | Adenosine deaminase domain-containing protein |
| | | | | | 1 (Testis nuclear RNA-binding protein) |
| 1430 | HLA-A*11:01_SISNPVLPPK | 1208 | ADAD1 | ENSG00000164113 | Adenosine deaminase domain-containing protein |
| | | | | | 1 (Testis nuclear RNA-binding protein) |
| 1431 | HLA-A*31:01_SLAAFIIER | 1209 | ADAD1 | ENSG00000164113 | Adenosine deaminase domain-containing protein |
| | | | | | 1 (Testis nuclear RNA-binding protein) |
| 1432 | HLA-B*35:01_HAGPNVYKF | 1210 | MAJIN | ENSG00000168070 | Membrane-anchored junction protein |
| 1433 | HLA-B*44:02_AESDVTRFLF | 1211 | HYPM | ENSG00000187516 | Huntingtin-interacting protein M (Huntinglin |
| | | | | | yeast partner M) |
| 1434 | HLA-B*44:03_AESDVTRFLF | 1211 | HYPM | ENSG00000187516 | Huntingtin-interacting protein M (Huntinglin |
| | | | | | yeast partner M) |
| 1435 | HLA-B*44:02_AESDVTRFL | 1212 | HYPM | ENSG00000187516 | Huntingtin-interacting protein M (Huntinglin |
| | | | | | yeast partner M) |
| 1436 | HLA-B*44:03_AESDVTRFL | 1212 | HYPM | ENSG00000187516 | Huntingtin-interacting protein M (Huntinglin |
| | | | | | yeast partner M) |
| 1437 | HLA-A*31:01_QVKTWFQNR | 1213 | BSH | ENSG00000188909 | Brain-specific homeobox protein homolog |
| 1438 | HLA-B*51:01_YPLMPTIL | 1214 | BSH | ENSG00000188909 | Brain-specific homeobox protein homolog |
| 1439 | HLA-B*18:01_EEETLKTLY | 1215 | Q5VXJ5 | ENSG00000198765 | Synaptonemal complex protein 1 (Fragment) |
| 1440 | HLA-B*44:03_EEETLKTLY | 1215 | Q5VXJ5 | ENSG00000198765 | Synaptonemal complex protein 1 (Fragment) |
| 1441 | HLA-C*05:01_IADEAVKL | 1216 | Q5VXJ5 | ENSG00000198765 | Synaptonemal complex protein 1 (Fragment) |
| 1442 | HLA-A*30:02_KQKFGEITDTY | 1217 | Q5VXJ5 | ENSG00000198765 | Synaptonemal complex protein 1 (Fragment) |
| 1443 | HLA-A*29:02_KVLGEKETLLY | 1218 | Q5VXJ5 | ENSG00000198765 | Synaptonemal complex protein 1 (Fragment) |
| 1444 | HLA-B*44:02_SEEETLKTLY | 1219 | Q5VXJ5 | ENSG00000198765 | Synaptonemal complex protein 1 (Fragment) |
| 1445 | HLA-B*44:03_SEEETLKTLY | 1219 | Q5VXJ5 | ENSG00000198765 | Synaptonemal complex protein 1 (Fragment) |
| 1446 | HLA-C*02:02_SEEETLKTLY | 1219 | Q5VXJ5 | ENSG00000198765 | Synaptonemal complex protein 1 (Fragment) |
| 1447 | HLA-B*35:01_TAITTSEQY | 1220 | Q5VXJ5 | ENSG00000198765 | Synaptonemal complex protein 1 (Fragment) |
| 1448 | HLA-A*11:01_TSVDHGISK | 1221 | Q5VXJ5 | ENSG00000198765 | Synaptonemal complex protein 1 (Fragment) |
| 1449 | HLA-A*11:01_TTSEQYYSK | 1222 | Q5VXJ5 | ENSG00000198765 | Synaptonemal complex protein 1 (Fragment) |
| 1450 | HLA-A*01:01_VSEEETLKTLY | 1223 | Q5VXJ5 | ENSG00000198765 | Synaptonemal complex protein 1 (Fragment) |
| 1451 | HLA-B*51:01_DAPKEINI | 1224 | RGS21 | ENSG00000253148 | Regulator of G-protein signaling 21 (RGS21) |
| 1452 | HLA-A*02:01_GLDAFRIFL | 1225 | RGS21 | ENSG00000253148 | Regulator of G-protein signaling 21 (RGS21) |
| 1453 | HLA-A*02:07_GLDAFRIFL | 1225 | RGS21 | ENSG00000253148 | Regulator of G-protein signaling 21 (RGS21) |
| 1454 | HLA-B*51:01_LPIEGQEI | 1226 | BUD | ENSG00000259571 | BH3-like motif-containing cell death inducer |
| | | | | | (Breast cancer cell protein 2) |
| 1455 | HLA-A*24:02_LYIGATGQF | 1227 | TCF24 | ENSG00000261787 | Transcription factor 24 (TCF-24) |
| 1456 | HLA-C*05:01_FTDEGDQLF | 1228 | SE1L2 | ENSG00000101251 | Protein sel-1 homolog 2 (Suppressor of lin-12- |
| | | | | | like protein 2)(Sel-1L2) |
| 1457 | HLA-A*29:02_GLHGLGLLY | 1229 | SE1L2 | ENSG00000101251 | Protein sel-1 homolog 2 (Suppressor of lin-12- |
| | | | | | like protein 2)(Sel-1L2) |
| 1458 | HLA-A*24:02_LYIKSLPTF | 1230 | SE1L2 | ENSG00000101251 | Protein sel-1 homolog 2 (Suppressor of lin-12- |
| | | | | | like protein 2)(Sel-1L2) |
| 1459 | HLA-B*35:01_NALGFLSSY | 1231 | SE1L2 | ENSG00000101251 | Protein sel-1 homolog 2 (Suppressor of lin-12- |
| | | | | | like protein 2)(Sel-1L2) |
| 1460 | HLA-B*44:03_TEIVLENNY | 305 | R4GMQ3 | ENSG00000107831 | Fibroblast growth factor 8 |
| 1461 | HLA-B*18:01_TEDIGPQF | 1232 | NMUR2 | ENSG00000132911 | Neuromedin-U receptor 2 (NMU-R2)(G-protein |
| | | | | | coupled receptor FM-4)(G-protein coupled |
| | | | | | receptor TGR-1) |
| 1462 | HLA-A*02:07_FLQEVITTV | 732 | ZAN | ENSG00000146839 | Zonadhesin |
| 1463 | HLA-A*01:01_HGDAHLQEY | 1233 | FATE1 | ENSG00000147378 | Fetal and adult testis-expressed transcript protein |
| | | | | | (Cancer/testis antigen 43)(CT43)(Tumor antigen |
| | | | | | BJ-HCC-2) |
| 1464 | HLA-A*11:01_STKPDMIQK | 1234 | IFNK | ENSG00000147896 | Interferon kappa (IFN-kappa) |
| 1465 | HLA-B*35:01_QPLQPSSPVAY | 1235 | PASD1 | ENSG00000166049 | Circadian clock protein PASD1 (Cancer/testis |
| | | | | | antigen 63)(CT63)(OX-TES-1)(PAS domain- |
| | | | | | containing protein 1) |
| 1466 | HLA-A*02:01_SLGPVVQV | 1236 | PASD1 | ENSG00000166049 | Circadian clock protein PASD1 (Cancer/testis |
| | | | | | antigen 63)(CT63)(OX-TES-1)(PAS domain- |
| | | | | | containing protein 1) |
| 1467 | HLA-A*30:02_AVSISTVGY | 1237 | KCNV2 | ENSG00000168263 | Potassium voltage-gated channel subfamily V |
| | | | | | member 2 (Voltage-gated potassium channel |
| | | | | | subunit Kv8.2) |
| 1468 | HLA-B*44:03_EEEQLQQARW | 1238 | CC185 | ENSG00000178395 | Coiled-coil domain-containing protein 185 |
| 1469 | HLA-B*44:02_EEQLQQARW | 1239 | CC185 | ENSG00000178395 | Coiled-coil domain-containing protein 185 |
| 1470 | HLA-B*44:03_EEQLQQARW | 1239 | CC185 | ENSG00000178395 | Coiled-coil domain-containing protein 185 |
| 1471 | HLA-B*35:01_FPVQATIDFY | 1240 | DSCR6 | ENSG00000183145 | Protein ripply3 (Down syndrome critical region |
| | | | | | protein 6) |
| 1472 | HLA-C*02:02_KEGEPVEFTF | 241 | LN28B | ENSG00000187772 | Protein lin-28 homolog B (Lin-28B) |
| 1473 | HLA-B*18:01_LEQLVLMY | 1241 | CS067 | ENSG00000188032 | UPF0575 protein C19orf67 |
| 1474 | HLA-A*30:02_RVAELINASY | 1085 | DC8L2 | ENSG00000189186 | DDB1-and CUL4-associated factor 8-like protein |
| | | | | | 2 (WD repeat-containing protein 42C) |
| 1475 | HLA-A*26:01_HVAGEQMAEY | 1242 | BTNL2 | ENSG00000204290 | Butyrophilin-like protein 2 (BTL-II) |
| 1476 | HLA-B*18:01_TEMQMEEY | 1243 | BTNL2 | ENSG00000204290 | Butyrophilin-like protein 2 (BTL-II) |
| 1477 | HLA-A*01:01_VTEMQMEEY | 1244 | BTNL2 | ENSG00000204290 | Butyrophilin-like protein 2 (BTL-II) |
| 1478 | HLA-B*18:01_MEFKAVIY | 1245 | GNAT3 | ENSG00000214415 | Guanine nucleotide-binding protein G(t) subunit |
| | | | | | alpha-3 (Gustducin alpha-3 chain) |
| 1479 | HLA-A*24:02_YYLNDLDRI | 1246 | GNAT3 | ENSG00000214415 | Guanine nucleotide-binding protein G(t) subunit |
| | | | | | alpha-3 (Gustducin alpha-3 chain) |
| 1480 | HLA-A*24:02_RYILENHDF | 1247 | RFPLB | ENSG00000251258 | Ret finger protein-like 4B (RING finger protein |
| | | | | | 211) |
| 1481 | HLA-A*30:02_TLQEGITGVY | 1248 | S35G6 | ENSG00000259224 | Solute carrier family 35 member G6 (Acyl- |
| | | | | | malonyl-condensing enzyme 1-like protein 3) |
| | | | | | (Transmembrane protein 21B) |
| 1482 | HLA-A*02:01_TLQEGITGV | 1249 | S35G6 | ENSG00000259224 | Solute carrier family 35 member G6 (Acyl- |
| | | | | | malonyl-condensing enzyme 1-like protein 3) |
| | | | | | (Transmembrane protein 21B) |
| 1483 | HLA-A*33:01_EYGNIPVVR | 1250 | TRPC7 | ENSG00000069018 | Short transient receptor potential channel 7 |
| | | | | | (TIpC7)(Transient receptor protein 7)(TRP-7) |
| | | | | | (hTRP7) |
| 1484 | HLA-A*03:01_GIADPNQSAK | 1251 | ADAM7 | ENSG00000069206 | Disintegrin and metalloproteinase domain- |
| | | | | | containing protein 7 (ADAM 7)(Sperm |
| | | | | | maturation-related glycoprotein GP-83) |
| 1485 | HLA-A*11:01_ATLELNETQVK | 1252 | HXB1 | ENSG00000120094 | Homeobox protein Hox-Bl (Homeobox protein |
| | | | | | Hox-2I) |
| 1486 | HLA-B*46:01_SINKSGASY | 1253 | TTLL2 | ENSG00000120440 | Probable tubulin polyglutamylase TTLL2 (EC 6.- |
| | | | | | .-.-)(Testis-specific protein NYD-TSPG) |
| | | | | | (Tubulin--tyro ine ligase-like protein 2) |
| 1487 | HLA-B*18:01_EEEKLFLSY | 680 | APOL5 | ENSG00000128313 | Apolipoprotein L5 (Apolipoprotein L-V)(ApoL- |
| | | | | | V) |
| 1488 | HLA-B*35:01_FPIVGDVAL | 1254 | TSN16 | ENSG00000130167 | Tetraspanin-16 (Tspan-16)(Tetraspanin TM4-B) |
| | | | | | (Transmembrane 4 superfamily member 16) |
| 1489 | HLA-A*02:07_MLDDIPEDNTL | 1255 | SPT22 | ENSG00000141255 | Spermatogenesis-associated protein 22 (Testis |
| | | | | | development protein NYD-SP20) |
| 1490 | HLA-C*16:01_AAFVSSRVL | 1256 | X6R6V8 | ENSG00000143552 | Nuclear pore membrane glycoprotein 210-like |
| 1491 | HLA-A*11:01_ATGSANMTK | 1257 | SPI2A | ENSG00000147059 | Spindlin-2A (Protein DXF34)(Spindlin-like |
| | | | | | protein 2A)(SPIN-2)(SPIN-2A) |
| 1492 | HLA-A*30:02_GVQTFTSGKY | 1258 | TRI49 | ENSG00000168930 | Tripartite motif-containing protein 49 (RING |
| | | | | | finger protein 18)(Testis-specific RING-finger |
| | | | | | protein) |
| 1493 | HLA-B*35:01_MPQPLNPEL | 1259 | TRI49 | ENSG00000168930 | Tripartite motif-containing protein 49 (RING |
| | | | | | finger protein 18)(Testis-specific RING-finger |
| | | | | | protein) |
| 1494 | HLA-A*24:02_NYFIDPVTI | 554 | TRI49 | ENSG00000168930 | Tripartite motif-containing protein 49 (RING |
| | | | | | finger protein 18)(Testis-specific RING-finger |
| | | | | | protein) |
| 1495 | HLA-A*11:01_SSQPSPSDPK | 1260 | VCX3 | ENSG00000169059 | Variable charge X-linked protein 3 (Variable |
| | | | | | charge protein on X with eight repeats)(VCX-8r) |
| | | | | | (Variably charged protein X-A)(VCX-A) |
| 1496 | HLA-B*44:03_AEYTGAQQKL | 1183 | CNGA2 | ENSG00000183862 | Cyclic nucleotide-gated olfactory channel (Cyclic |
| | | | | | nucleotide-gated cation channel 2)(Cyclic |
| | | | | | nucleotide-gated channel alpha-2)(CNG channel |
| | | | | | alpha-2)(CNG-2)(CNG2) |
| 1497 | HLA-A*29:02_ILLDPVQRNLY | 1261 | ZN560 | ENSG00000198028 | Zinc finger protein 560 |
| 1498 | HLA-A*11:01_AGESGKSTIVK | 1262 | GNAT3 | ENSG00000214415 | Guanine nucleotide-binding protein G(t) subunit |
| | | | | | alpha-3 (Gustducin alpha-3 chain) |
| 1499 | HLA-A*26:01_EIIIYGPAY | 1263 | PSG1 | ENSG00000231924 | Pregnancy-specific beta-1-glycoprotein 1 (PS- |
| | | | | | beta-G-1)(PSBG-1)(Pregnancy-specific |
| | | | | | glycoprotein 1)(CD66 antigen-like family |
| | | | | | member F)(Fetal liver non-specific cross-reactive |
| | | | | | antigen 1/2)(FL-NCA-1/2)(PSG95)(Pregnancy- |
| | | | | | specific beta-1 glycoprotein CID)(PS-beta-C/D) |
| | | | | | (CD antigen CD66f) |
| 1500 | HLA-A*24:02_EYLTQAAFF | 1264 | BHMG1 | ENSG00000237452 | Basic helix-loop-helix and HMG box domain- |
| | | | | | containing protein 1 |
| 1501 | HLA-A*02:07_SIDQIYKKL | 1265 | SMC1B | ENSG00000077935 | Structural maintenance of chromosomes protein |
| | | | | | 1B (SMC protein 1B)(SMC-1-beta)(SMC-1B) |
| 1502 | HLA-A*11:01_IVVDKSDLIPK | 1266 | TDRD1 | ENSG00000095627 | Tudor domain-containing protein 1 (Cancer/testis |
| | | | | | antigen 41.1)(CT41.1) |
| 1503 | HLA-A*24:02_NYPETLKFMLI | 1267 | S14L3 | ENSG00000100012 | SEC14-like protein 3 (Tocopherol-associated |
| | | | | | protein 2) |
| 1504 | HLA-A*30:02_STLKFIGQY | 1268 | MORC1 | ENSG00000114487 | MORC family CW-type zinc finger protein 1 |
| | | | | | (Cancer/testis antigen 33)(CT33) |
| 1505 | HLA-B*51:01_DAPIIKEI | 1269 | H3BVE8 | ENSG00000121446 | Regulator of G-protein-signaling protein-like |
| 1506 | HLA-B*51:01_EGNPLLLTV | 1270 | H3BVE8 | ENSG00000121446 | Regulator of G-protein-signaling protein-like |
| 1507 | HLA-A*02:01_FLEGNPLLLTV | 1271 | H3BVE8 | ENSG00000121446 | Regulator of G-protein-signaling protein-like |
| 1508 | HLA-A*29:02_GFWSDTILY | 1272 | H3BVE8 | ENSG00000121446 | Regulator of G-protein-signaling protein-like |
| 1509 | HLA-C*02:02_QEMQNSKENF | 1273 | H3BVE8 | ENSG00000121446 | Regulator of G-protein-signaling protein-like |
| 1510 | HLA-A*24:02_SYLTGSAGEEL | 1274 | H3BVE8 | ENSG00000121446 | Regulator of G-protein-signaling protein-like |
| 1511 | HLA-A*24:02_VFADFFNTF | 1275 | H3BVE8 | ENSG00000121446 | Regulator of G-protein-signaling protein-like |
| 1512 | HLA-C*02:02_SEQMSRTNY | 1276 | NMUR2 | ENSG00000132911 | Neuromedin-U receptor 2 (NMU-R2)(G-protein |
| | | | | | coupled receptor FM-4)(G-protein coupled |
| | | | | | receptor TGR-1) |
| 1513 | HLA-B*44:03_MEFSGENRGY | 1277 | RBM46 | ENSG00000151962 | Probable RNA-binding protein 46 (Cancer/testis |
| | | | | | antigen 68)(CT68)(RNA-binding motif protein |
| | | | | | 46) |
| 1514 | HLA-B*08:01_HPQLRKVTL | 1278 | S22AD | ENSG00000172940 | Solute carrier family 22 member 13 (Organic |
| | | | | | cation transporter-like 3)(ORCTL-3) |
| 1515 | HLA-B*44:03_AEAPLSQRW | 1279 | CI131 | ENSG00000174038 | Uncharacterized protein C9orf131 |
| 1516 | HLA-B*18:01_VEAPVSTF | 1280 | CI131 | ENSG00000174038 | Uncharacterized protein C9orf131 |
| 1517 | HLA-A*01:01_VSEPIADQSNY | 1281 | CI131 | ENSG00000174038 | Uncharacterized protein C9orf131 |
| 1518 | HLA-A*02:07_YLDSFADGL | 1282 | TEX36 | ENSG00000175018 | Testis-expressed protein 36 |
| 1519 | HLA-A*02:01_LLFDKEPINV | 1283 | HORM2 | ENSG00000176635 | HORMA domain-containing protein 2 |
| 1520 | HLA-A*29:02_YFSHHILAVY | 1284 | FBX39 | ENSG00000177294 | F-box only protein 39 |
| 1521 | HLA-B*18:01_SEYQLNDSAAY | 1285 | GNAT3 | ENSG00000214415 | Guanine nucleotide-binding protein G(t) subunit |
| | | | | | alpha-3 (Gustducin alpha-3 chain) |
| 1522 | HLA-B*18:01_DDVIISSGY | 1286 | ACSM4 | ENSG00000215009 | Acyl-coenzyme A synthetase ACSM4, |
| | | | | | mitochondrial (EC 6.2.1.2)(Acyl-CoA synthetase |
| | | | | | medium-chain family member 4) |
| 1523 | HLA-A*03:01_AILLQVIAK | 1133 | TDR15 | ENSG00000218819 | Tudor domain-containing protein 15 |
| 1524 | HLA-B*46:01_LVASGLATY | 1287 | TDR15 | ENSG00000218819 | Tudor domain-containing protein 15 |
| 1525 | HLA-B*44:03_SENIDVISL | 1288 | TDR15 | ENSG00000218819 | Tudor domain-containing protein 15 |
| 1526 | HLA-A*29:02_TFPSLFSLY | 1289 | TDR15 | ENSG00000218819 | Tudor domain-containing protein 15 |
| 1527 | HLA-B*18:01_EEITLRENF | 1290 | RD21L | ENSG00000244588 | Double-strand-break repair protein rad21-like |
| | | | | | protein 1 |
| 1528 | HLA-B*44:03_EEITLRENF | 1290 | RD21L | ENSG00000244588 | Double-strand-break repair protein rad21-like |
| | | | | | protein 1 |
| 1529 | HLA-B*44:02_EENIETERW | 1291 | RD21L | ENSG00000244588 | Double-strand-break repair protein rad21-like |
| | | | | | protein 1 |
| 1530 | HLA-B*44:03_EENIETERW | 1291 | RD21L | ENSG00000244588 | Double-strand-break repair protein rad21-like |
| | | | | | protein 1 |
| 1531 | HLA-B*35:01_NAIDVSEHF | 1292 | RD21L | ENSG00000244588 | Double-strand-break repair protein rad21-like |
| | | | | | protein 1 |
| 1532 | HLA-B*35:01_NAITLPEEF | 1293 | RD21L | ENSG00000244588 | Double-strand-break repair protein rad21-like |
| | | | | | protein 1 |
| 1533 | HLA-A*24:02_PYADIIATM | 1294 | RD21L | ENSG00000244588 | Double-strand-break repair protein rad21-like |
| | | | | | protein 1 |
| 1534 | HLA-B*18:01_DEKLTVTSL | 1295 | ESX1 | ENSG00000123576 | Homeobox protein ESX1 (Extraembryonic, |
| | | | | | spermatogenesis, homeobox 1)[Cleaved into: |
| | | | | | Homeobox protein ESX1-N; Homeobox protein |
| | | | | | ESX1-C] |
| 1535 | HLA-B*44:02_EEAANSGYSW | 381 | PRDM7 | ENSG00000126856 | Probable histone-lysine N-methyltransferase |
| | | | | | PRDM7 (EC 2.1.1.43)(PR domain zinc finger |
| | | | | | protein 7)(PR domain-containing protein 7) |
| 1536 | HLA-B*35:01_LPDKVFIKY | 1296 | RXFP2 | ENSG00000133105 | Relaxin receptor 2 (G-protein coupled receptor |
| | | | | | 106)(G-protein coupled receptor affecting |
| | | | | | testicular descent)(Leucine-rich repeat- |
| | | | | | containing G-protein coupled receptor 8)(Relaxin |
| | | | | | family peptide receptor 2) |
| 1537 | HLA-A*02:01_AVADTLIGV | 1297 | GP119 | ENSG00000147262 | Glucose-dependent insulinotmpic receptor (G- |
| | | | | | protein coupled receptor 119) |
| 1538 | HLA-A*11:01_ASLDSITHR | 1298 | CD045 | ENSG00000164123 | Uncharacterized protein C4orf45 |
| 1539 | HLA-A*29:02_YLPGLLYKF | 1299 | ZPLD1 | ENSG00000170044 | Zona pellucida-like domain-containing protein 1 |
| | | | | | (ZP domain-containing protein 1) |
| 1540 | HLA-A*30:02_TSLDMTHPY | 1300 | SP7 | ENSG00000170374 | Transcription factor Sp7 (Zinc finger protein |
| | | | | | osterix) |
| 1541 | HLA-A*02:07_ALMEVTVYL | 470 | NAL11 | ENSG00000179873 | NACHT, LRR and PYD domains-containing |
| | | | | | protein 11 (Nucleotide-binding oligomerization |
| | | | | | domain protein 17)(PAAD-and NACHT domain- |
| | | | | | containing protein 10)(PYRIN-containing |
| | | | | | APAF1-like protein 6) |
| 1542 | HLA-B*35:01_MPQPLNPEL | 1259 | TR49B | ENSG00000182053 | Putative tripartite motif-containing protein 49B |
| | | | | | (RING finger protein 18B) |
| 1543 | HLA-B*18:01_DEHTGIHTM | 1301 | FAM9A | ENSG00000183304 | Protein FAM9A |
| 1544 | HLA-A*02:07_MLDALLVHI | 1302 | TMM89 | ENSG00000183396 | Transmembrane protein 89 |
| 1545 | HLA-C*05:01_VADDGVTQY | 1188 | CNGA2 | ENSG00000183862 | Cyclic nucleotide-gated olfactory channel (Cyclic |
| | | | | | nucleotide-gated cation chamiel 2)(Cyclic |
| | | | | | nucleotide-gated channel alpha-2)(CNG channel |
| | | | | | alpha-2)(CNG-2)(CNG2) |
| 1546 | HLA-A*11:01_ASSAPTAEK | 1303 | HOYFA1 | ENSG00000185958 | Protein FAM186A (Fragment) |
| 1547 | HLA-B*18:01_EETQILRDTF | 1304 | HOYFA1 | ENSG00000185958 | Protein FAM186A (Fragment) |
| 1548 | HLA-B*44:03_EETQILRDTF | 1304 | HOYFA1 | ENSG00000185958 | Protein FAM186A (Fragment) |
| 1549 | HLA-A*03:01_KVAQVPFTTK | 1305 | HOYFA1 | ENSG00000185958 | Protein FAM186A (Fragment) |
| 1550 | HLA-A*11:01_STSSYPIAEK | 1306 | HOYFA1 | ENSG00000185958 | Protein FAM186A (Fragment) |
| 1551 | HLA-B*46:01_VLKDVQRSY | 1307 | HOYFA1 | ENSG00000185958 | Protein FAM186A (Fragment) |
| 1552 | HLA-A*01:01_VSEAKPSQY | 1308 | HOYFA1 | ENSG00000185958 | Protein FAM186A (Fragment) |
| 1553 | HLA-A*02:07_LLPSWVPEV | 1309 | SPT21 | ENSG00000187144 | Spermatogenesis-associated protein 21 |
| 1554 | HLA-C*02:02_AESDVTRFL | 1212 | HYPM | ENSG00000187516 | Huntingtin-interacting protein M (Huntingtin |
| | | | | | yeast partner M) |
| 1555 | HLA-A*11:01_STVFDPVFK | 1310 | RFA4 | ENSG00000204086 | Replication protein A 30 kDa subunit (RP-A p30) |
| | | | | | (Replication factor A protein 4)(RF-A protein 4) |
| 1556 | HLA-A*29:02_IFSAINPVLYY | 1311 | M4A18 | ENSG00000214782 | Membrane-spanning 4-domains subfamily A |
| | | | | | member 18 |
| 1557 | HLA-A*11:01_VTTYPISPK | 1312 | M4A18 | ENSG00000214782 | Membrane-spanning 4-domains subfamily A |
| | | | | | member 18 |
| 1558 | HLA-A*29:02_LFLFGVTKY | 1313 | PSG3 | ENSG00000221826 | Pregnancy-specific beta-1-glycoprotein 3 (PS- |
| | | | | | beta-G-3)(PSBG-3)(Pregnancy-specific |
| | | | | | glycoprotein 3)(Carcinoembryonic antigen SG5) |
| 1559 | HLA-B*51:01_LPKLPKPYI | 578 | PSG3 | ENSG00000221826 | Pregnancy-specific beta-1-glycoprotein 3 (PS- |
| | | | | | beta-G-3)(PSBG-3)(Pregnancy-specific |
| | | | | | glycoprotein 3)(Carcinoembryonic antigen SG5) |
| 1560 | HLA-B*51:01_LPTTAQVTI | 579 | PSG3 | ENSG00000221826 | Pregnancy-specific beta-1-glycoprotein 3 (PS- |
| | | | | | beta-G-3)(PSBG-3)(Pregnancy-specific |
| | | | | | glycoprotein 3)(Carcinoembryonic antigen SG5) |
| 1561 | HLA-C*01:02_QVPGGSQEL | 1314 | ANHX | ENSG00000227059 | Anomalous homeobox protein |
| 1562 | HLA-A*26:01_SVANSTVAY | 615 | AP2D | ENSG00000008197 | Transcription factor AP-2-delta (AP2-delta) |
| | | | | | (Activating enhancer-binding protein 2-delta) |
| | | | | | (Transcription factor AP-2-beta-like 1) |
| 1563 | HLA-A*24:02_AYAERLGVTF | 1315 | RB40L | ENSG00000102128 | Ras-related protein Rab-40A-like (Ras-like |
| | | | | | GTPase) |
| 1564 | HLA-A*30:02_GAQGVILVY | 1316 | RB40L | ENSG00000102128 | Ras-related protein Rab-40A-like (Ras-like |
| | | | | | GTPase) |
| 1565 | HLA-B*51:01_HAPGVPKI | 1317 | RB40L | ENSG00000102128 | Ras-related protein Rab-40A-like (Ras-like |
| | | | | | GTPase) |
| 1566 | HLA-C*01:02_NIIESFTEL | 1318 | RB40L | ENSG00000102128 | Ras-related protein Rab-40A-like (Ras-like |
| | | | | | GTPase) |
| 1567 | HLA-B*35:01_QAYAERLGVTF | 1319 | RB40L | ENSG00000102128 | Ras-related protein Rab-40A-like (Ras-like |
| | | | | | GTPase) |
| 1568 | HLA-B*35:01_APANIQVSF | 1320 | FNDC7 | ENSG00000143107 | Fibronectin type III domain-containing protein 7 |
| 1569 | HLA-B*51:01_DAFSMINV | 1321 | FNDC7 | ENSG00000143107 | Fibronectin type III domain-containing protein 7 |
| 1570 | HLA-A*26:01_DTKYNITVY | 1322 | FNDC7 | ENSG00000143107 | Fibronectin type III domain-containing protein 7 |
| 1571 | HLA-A*30:02_GQSPLGDIFNY | 1323 | FNDC7 | ENSG00000143107 | Fibronectin type III domain-containing protein 7 |
| 1572 | HLA-A*11:01_TVMVSPVAK | 1324 | FNDC7 | ENSG00000143107 | Fibronectin type III domain-containing protein 7 |
| 1573 | HLA-C*01:02_VSPVAKTGL | 1325 | FNDC7 | ENSG00000143107 | Fibronectin type III domain-containing protein 7 |
| 1574 | HLA-B*51:01_SAAASVLTV | 1326 | GP119 | ENSG00000147262 | Glucose-dependent insulinotmpic receptor (G- |
| | | | | | protein coupled receptor 119) |
| 1575 | HLA-A*29:02_AFIIKTIGQLY | 1327 | BOLL | ENSG00000152430 | Protein boule-like |
| 1576 | HLA-B*51:01_DAMTAFESI | 1328 | J3KNE0 | ENSG00000153165 | RanBP2-like and GRIP domain-containing |
| | | | | | protein 3 |
| 1577 | HLA-B*44:03_EESSINYTF | 1329 | J3KNE0 | ENSG00000153165 | RanBP2-like and GRIP domain-containing |
| | | | | | protein 3 |
| 1578 | HLA-C*04:01_HFDESTTGSNF | 1330 | J3KNE0 | ENSG00000153165 | RanBP2-like and GRIP domain-containing |
| | | | | | protein 3 |
| 1579 | HLA-A*03:01_KLFPGSPAIYK | 1331 | J3KNE0 | ENSG00000153165 | RanBP2-like and GRIP domain-containing |
| | | | | | protein 3 |
| 1580 | HLA-B*18:01_NEQVVFSH | 1332 | J3KNE0 | ENSG00000153165 | RanBP2-like and GRIP domain-containing |
| | | | | | protein 3 |
| 1581 | HLA-A*11:01_SQYGKMANK | 1333 | J3KNE0 | ENSG00000153165 | RanBP2-like and GRIP domain-containing |
| | | | | | protein 3 |
| 1582 | HLA-A*11:01_SVQGSAPSPRK | 1334 | J3KNE0 | ENSG00000153165 | RanBP2-like and GRIP domain-containing |
| | | | | | protein 3 |
| 1583 | HLA-B*51:01_TAFESIKSV | 1335 | J3KNE0 | ENSG00000153165 | RanBP2-like and GRIP domain-containing |
| | | | | | protein 3 |
| 1584 | HLA-A*11:01_VVVETFANK | 1336 | J3KNE0 | ENSG00000153165 | RanBP2-like and GRIP domain-containing |
| | | | | | protein 3 |
| 1585 | HLA-B*44:03_SEIDQGKGY | 1337 | S4R404 | ENSG00000163424 | Uncharacterized protein C3orf30 |
| 1586 | HLA-C*02:02_SEIDQGKGY | 1337 | S4R404 | ENSG00000163424 | Uncharacterized protein C3orf30 |
| 1587 | HLA-A*26:01_EVVVALILQY | 1338 | S35G3 | ENSG00000164729 | Solute carrier family 35 member G3 (Acyl- |
| | | | | | malonyl-condensing enzyme 1)(Transmembrane |
| | | | | | protein 21A) |
| 1588 | HLA-B*51:01_TAYLWIRQI | 1339 | ACHA9 | ENSG00000174343 | Neuronal acetylcholine receptor subunit alpha-9 |
| | | | | | (Nicotinic acetylcholine receptor subunit alpha-9) |
| | | | | | (NACHR alpha-9) |
| 1589 | HLA-A*01:01_SSEDLHVFY | 1340 | CTSRD | ENSG00000174898 | Cation channel sperm-associated protein subunit |
| | | | | | delta (CatSper-delta)(CatSperdelta) |
| | | | | | (Transmembrane protein 146) |
| 1590 | HLA-B*46:01_VAHLELATY | 1341 | FMR1N | ENSG00000176988 | Fragile X mental retardation 1 neighbor protein |
| | | | | | (Cancer/testis antigen 37)(CT37)(Sarcoma |
| | | | | | antigen NY-SAR-35) |
| 1591 | HLA-A*11:01_ATGWGLVSK | 1342 | PRS38 | ENSG00000185888 | Serine protease 38 (EC 3.4.21.-)(Marapsin-2) |
| 1592 | HLA-A*30:02_GSSSGLSSSY | 1343 | HORN | ENSG00000197915 | Hornerin |
| 1593 | HLA-A*29:02_NAGPLNVLY | 1344 | S4R3Z8 | ENSG00000203963 | Uncharacterized protein C1orf141 (Fragment) |
| 1594 | HLA-B*35:01_NAGPLNVLY | 1344 | S4R3Z8 | ENSG00000203963 | Uncharacterized protein C1orf141 (Fragment) |
| 1595 | HLA-A*30:02_ATSPPTPGHY | 1345 | A0A0U1RQF7 | ENSG00000263201 | HCG1775037 |
| 1596 | HLA-B*44:03_KEVDPTGHSF | 379 | MAGAA | ENSG00000124260 | Melanoma-associated antigen 10 (Cancer/testis |
| | | | | | antigen 1.10)(CT1.10)(MAGE-10 antigen) |
| 1597 | HLA-B*18:01_DEMGVVGYF | 1346 | OTOR | ENSG00000125879 | Otoraplin (Fibrocyte-derived protein)(Melanoma |
| | | | | | inhibitory activity-like protein) |
| 1598 | HLA-C*01:02_AAPLAAGAL | 1347 | OCSTP | ENSG00000149635 | Osteoclast stimulatory transmembrane protein |
| | | | | | (OC-STAMP) |
| 1599 | HLA-C*02:02_AEQLVKTGW | 1348 | OCSTP | ENSG00000149635 | Osteoclast stimulatory transmembrane protein |
| | | | | | (OC-STAMP) |
| 1600 | HLA-B*44:03_SEGEGKELW | 1349 | OCSTP | ENSG00000149635 | Osteoclast stimulatory transmembrane protein |
| | | | | | (OC-STAMP) |
| 1601 | HLA-A*30:02_RLYQTDPSGTY | 1350 | PSA7L | ENSG00000154611 | Proteasome subunit alpha type-7-like (EC |
| | | | | | 3.4.25.1) |
| 1602 | HLA-A*29:02_WVQENYLEY | 75 | MAGA8 | ENSG00000156009 | Melanoma-associated antigen 8 (Cancer/testis |
| | | | | | antigen 1.8)(CT1.8)(MAGE-8 antigen) |
| 1603 | HLA-A*33:01_ELQGPWHTR | 1351 | SUN3 | ENSG00000164744 | SUN domain-containing protein 3 (Sad1/unc-84 |
| | | | | | domain-containing protein 1) |
| 1604 | HLA-A*03:01_GIFPKIMPK | 1352 | SSX3 | ENSG00000165584 | Protein SSX3 (Cancer/testis antigen 5.3)(CT5.3) |
| 1605 | HLA-A*29:02_SVFDEKQQWKF | 1353 | ESPB1 | ENSG00000169393 | Epididymal sperm-binding protein 1 (Epididymal |
| | | | | | secretory protein 12)(hE12) |
| 1606 | HLA-A*31:01_ASGPPAPAR | 798 | NGN1 | ENSG00000181965 | Neurogenin-1 (NGN-1)(Class A basic helix-loop- |
| | | | | | helix protein 6)(bHLHa6)(Neurogenic basic- |
| | | | | | helix-loop-helix protein)(Neurogenic |
| | | | | | differentiation factor 3)(NeuroD3) |
| 1607 | HLA-C*02:02_QEGSSGMELSW | 644 | TEX19 | ENSG00000182459 | Testis-expressed protein 19 |
| 1608 | HLA-A*01:01_VSDPAKIAIHY | 1354 | KCNH7 | ENSG00000184611 | Potassium voltage-gated channel subfamily H |
| | | | | | member 7 (Ether-a-go-go-related gene potassium |
| | | | | | channel 3)(ERG-3)(Eag-related protein 3) |
| | | | | | (Ether-a-go-go-related protein 3)(hERG-3) |
| | | | | | (Voltage-gated potassium channel subunit |
| | | | | | Kv11.3) |
| 1609 | HLA-A*02:01_SLVNLQPEL | 1355 | FOXE3 | ENSG00000186790 | Forkhead box protein E3 (Forkhead-related |
| | | | | | protein FKHL12)(Forkhead-related transcription |
| | | | | | factor 8)(FREAC-8) |
| 1610 | HLA-B*35:01_SPLEVPQSF | 1356 | MAGBG | ENSG00000189023 | Melanoma-associated antigen B16 (MAGE-B16 |
| | | | | | antigen) |
| 1611 | HLA-A*11:01_ATLENLLSH | 1044 | PRAM9 | ENSG00000204501 | PRAME family member 9/15 |
| 1612 | HLA-A*02:07_TLDEYLTYL | 1357 | PRAM9 | ENSG00000204501 | PRAME family member 9/15 |
| 1613 | HLA-B*51:01_DGYYRGIVV | 1358 | MO2R2 | ENSG00000206531 | Cell surface glycoprotein CD200 receptor 2 |
| | | | | | (CD200 cell surface glycoprotein receptor-like 2) |
| | | | | | (CD200 receptor-like 2)(HuCD200R2)(CD200 |
| | | | | | cell surface glycoprotein receptor-like a) |
| | | | | | (CD200RLa)(Cell surface glycoprotein CD200 |
| | | | | | receptor 1-like)(Cell surface glycoprotein 0X2 |
| | | | | | receptor 2) |
| 1614 | HLA-B*51:01_IAPDNVHVI | 1359 | M4A18 | ENSG00000214782 | Membrane-spanning 4-domains subfamily A |
| | | | | | member 18 |
| 1615 | HLA-B*08:01_DVVAKTSL | 1360 | E5RK72 | ENSG00000215262 | Potassium channel subfamily U member 1 |
| 1616 | HLA-B*44:03_GEIIIYGPAY | 1361 | PSG1 | ENSG00000231924 | Pregnancy-specific beta-1-glycoprotein 1 (PS- |
| | | | | | beta-G-1)(PSBG-1)(Pregnancy-specific |
| | | | | | glycoprotein 1)(CD66 antigen-like family |
| | | | | | member F)(Fetal liver non-specific cross-reactive |
| | | | | | antigen 1/2)(FL-NCA-1/2)(PSG95)(Pregnancy- |
| | | | | | specific beta-1 glycoprotein C/D)(PS-beta-C/D) |
| | | | | | (CD antigen CD66f) |
| 1617 | HLA-B*35:01_HPTLGPSAF | 1362 | TIFAB | ENSG00000255833 | TRAF-interacting protein with FHA domain- |
| | | | | | containing protein B (TWA-like protein) |
| 1618 | HLA-A*33:01_DYRDKSPQNR | 1363 | ERVV2 | ENSG00000268964 | Endogenous retrovirus group V member 2 Env |
| | | | | | polyprotein (HERV-V_19q13.41 provirus |
| | | | | | ancestral Env polyprotein 2) |
| 1619 | HLA-A*02:01_SLLNGEVAV | 1364 | TSN16 | ENSG00000130167 | Tetraspanin-16 (Tspan-16)(Tetraspanin TM4-B) |
| | | | | | (Transmembrane 4 superfamily member 16) |
| 1620 | HLA-B*18:01_AEVLAQSF | 1365 | PRD12 | ENSG00000130711 | PR domain zinc finger protein 12 (EC 2.1.1.-) |
| | | | | | (PR domain-containing protein 12) |
| 1621 | HLA-A*26:01_EVFNEDGTVRY | 1366 | PRD12 | ENSG00000130711 | PR domain zinc finger protein 12 (EC 2.1.1.-) |
| | | | | | (PR domain-containing protein 12) |
| 1622 | HLA-A*26:01_EVITSDILHSF | 1367 | PRD12 | ENSG00000130711 | PR domain zinc finger protein 12 (EC 2.1.1.-) |
| | | | | | (PR domain-containing protein 12) |
| 1623 | HLA-A*26:01_EVVQIGTSIF | 1368 | PRD12 | ENSG00000130711 | PR domain zinc finger protein 12 (EC 2.1.1.-) |
| | | | | | (PR domain-containing protein 12) |
| 1624 | HLA-A*11:01_SVLPAEALVLK | 1369 | PRD12 | ENSG00000130711 | PR domain zinc finger protein 12 (EC 2.1.1.-) |
| | | | | | (PR domain-containing protein 12) |
| 1625 | HLA-A*01:01_TSDILHSFLY | 1370 | PRD12 | ENSG00000130711 | PR domain zinc finger protein 12 (EC 2.1.1.-) |
| | | | | | (PR domain-containing protein 12) |
| 1626 | HLA-A*02:07_TLADALHTL | 596 | MSGN1 | ENSG00000151379 | Mesogenin-1 (Paraxial mesoderm-specific |
| | | | | | mesogenin1)(pMesogenin1)(pMsgn1) |
| 1627 | HLA-A*11:01_RTMVFVETK | 1371 | DDX4 | ENSG00000152670 | Probable ATP-dependent RNA helicase DDX4 |
| | | | | | (EC 3.6.4.13)(DEAD box protein 4)(Vasa |
| | | | | | homolog) |
| 1628 | HLA-B*44:03_REVLPLATF | 1372 | TERT | ENSG00000164362 | Telomerase reverse transcriptase (EC 2.7.7.49) |
| | | | | | (HEST2)(Telomerase catalytic subunit) |
| | | | | | (Telomerase-associated protein 2)(TP2) |
| 1629 | HLA-A*26:01_ETTGKVIYF | 1373 | S6A18 | ENSG00000164363 | Sodium-dependent neutral amino acid transporter |
| | | | | | B(0)AT3 (Sodium-and chloride-dependent |
| | | | | | transporter XTRP2)(Solute carrier family 6 |
| | | | | | member 18)(System B(0) neutral amino acid |
| | | | | | transporter AT3) |
| 1630 | HLA-A*03:01_LLFWKPLRY | 172 | S6A18 | ENSG00000164363 | Sodium-dependent neutral amino acid transporter |
| | | | | | B(0)AT3 (Sodium-and chloride-dependent |
| | | | | | transporter XTRP2)(Solute carrier family 6 |
| | | | | | member 18)(System B(0) neutral amino acid |
| | | | | | transporter AT3) |
| 1631 | HLA-A*26:01_DSVPLIAQY | 1374 | CRFM7 | ENSG00000166664 | CHRNA7-FAM7A fusion protein (CHRNA7- |
| | | | | | DR1)(D-10) |
| 1632 | HLA-B*44:03_AEAALQTLL | 1375 | MRO2B | ENSG00000171495 | Maestro heat-like repeat-containing protein |
| | | | | | family member 2B (HEAT repeat-containing |
| | | | | | protein 7B2)(Sperm PKA-interacting factor) |
| | | | | | (SPIF) |
| 1633 | HLA-B*44:03_AEDQGFQFSY | 1376 | MRO2B | ENSG00000171495 | Maestro heat-like repeat-containing protein |
| | | | | | family member 2B (HEAT repeat-containing |
| | | | | | protein 7B2)(Sperm PKA-interacting factor) |
| | | | | | (SPIF) |
| 1634 | HLA-B*18:01_DEFVVLAL | 1377 | MRO2B | ENSG00000171495 | Maestro heat-like repeat-containing protein |
| | | | | | family member 2B (HEAT repeat-containing |
| | | | | | protein 7B2)(Sperm PKA-interacting factor) |
| | | | | | (SPIF) |
| 1635 | HLA-A*26:01_EAISQIASF | 1378 | MRO2B | ENSG00000171495 | Maestro heat-like repeat-containing protein |
| | | | | | family member 2B (HEAT repeat-containing |
| | | | | | protein 7B2)(Sperm PKA-interacting factor) |
| | | | | | (SPIF) |
| 1636 | HLA-A*26:01_EVISMGTSV | 1379 | MRO2B | ENSG00000171495 | Maestro heat-like repeat-containing protein |
| | | | | | family member 2B (HEAT repeat-containing |
| | | | | | protein 7B2)(Sperm PKA-interacting factor) |
| | | | | | (SPIF) |
| 1637 | HLA-A*02:07_HLWDPNPKIGV | 1380 | MRO2B | ENSG00000171495 | Maestro heat-like repeat-containing protein |
| | | | | | family member 2B (HEAT repeat-containing |
| | | | | | protein 7B2)(Sperm PKA-interacting factor) |
| | | | | | (SPIF) |
| 1638 | HLA-A*02:07_HMDTVVVNL | 1381 | MRO2B | ENSG00000171495 | Maestro heat-like repeat-containing protein |
| | | | | | family member 2B (HEAT repeat-containing |
| | | | | | protein 7B2)(Sperm PKA-interacting factor) |
| | | | | | (SPIF) |
| 1639 | HLA-A*02:07_ILDDAIVQRL | 1382 | MRO2B | ENSG00000171495 | Maestro heat-like repeat-containing protein |
| | | | | | family member 2B (HEAT repeat-containing |
| | | | | | protein 7B2)(Sperm PKA-interacting factor) |
| | | | | | (SPIF) |
| 1640 | HLA-A*11:01_IVMGDLSTK | 1383 | MRO2B | ENSG00000171495 | Maestro heat-like repeat-containing protein |
| | | | | | family member 2B (HEAT repeat-containing |
| | | | | | protein 7B2)(Sperm PKA-interacting factor) |
| | | | | | (SPIF) |
| 1641 | HLA-A*01:01_LTDRDVSFY | 1384 | MRO2B | ENSG00000171495 | Maestro heat-like repeat-containing protein |
| | | | | | family member 2B (HEAT repeat-containing |
| | | | | | protein 7B2)(Sperm PKA-interacting factor) |
| | | | | | (SPIF) |
| 1642 | HLA-B*18:01_DEIFNTEAM | 1385 | SL9C1 | ENSG00000172139 | Sodium/hydrogen exchanger 10 (Na(+)/H(+) |
| | | | | | exchanger 10)(NHE-10)(Solute carrier family 9 |
| | | | | | member 10)(Solute carrier family 9 member Cl) |
| | | | | | (Sperm-specific Na(+)/H(+) exchanger)(sNHE) |
| 1643 | HLA-B*44:03_SEVEEPLTVW | 1386 | VCX2 | ENSG00000177504 | Variable charge X-linked protein 2 (Variable |
| | | | | | charge protein on X with two repeats)(VCX-2r) |
| | | | | | (Variably charged protein X-B)(VCX-B) |
| 1644 | HLA-A*02:01_LLWERIELYL | 1387 | GDPD4 | ENSG00000178795 | Glycerophosphodiester phosphodiesterase |
| | | | | | domain-containing protein 4 (EC 3.1.-.-) |
| | | | | | (Glycerophosphodiester phosphodiesterase 6) |
| | | | | | (UgpQ) |
| 1645 | HLA-A*11:01_SSQPSPSDPK | 1260 | VCX1 | ENSG00000182583 | Variable charge X-linked protein 1 (Variable |
| | | | | | charge protein on X with ten repeats)(VCX-10r) |
| | | | | | (Variably charged protein X-B1)(VCX-B1) |
| 1646 | HLA-A*33:01_EMYAIYQQR | 1388 | SAMD7 | ENSG00000187033 | Sterile alpha motif domain-containing protein 7 |
| | | | | | (SAM domain-containing protein 7) |
| 1647 | HLA-A*03:01_SSYNRGLISK | 196 | NPSR1 | ENSG00000187258 | Neuropeptide S receptor (G-protein coupled |
| | | | | | receptor 154)(G-protein coupled receptor |
| | | | | | PGR14)(G-protein coupled receptor for asthma |
| | | | | | susceptibility) |
| 1648 | HLA-A*02:01_GLLEISQQL | 1389 | CS067 | ENSG00000188032 | UPF0575 protein Cq9orf67 |
| 1649 | HLA-A*02:01_VLITAVVEV | 1390 | RN133 | ENSG00000188050 | E3 ubiquitin-protein ligase RNF133 (EC |
| | | | | | 2.3.2.27)(RING finger protein 133)(RING-type |
| | | | | | E3 ubiquitin transferase RNF133) |
| 1650 | HLA-A*02:07_FMDFLQTLL | 1391 | SG1C1 | ENSG00000188076 | Secretoglobin family 1C member 1 |
| | | | | | (Secretoglobin RYD5) |
| 1651 | HLA-B*44:03_SESSTILVVRY | 316 | SPNXD | ENSG00000196406 | Sperm protein associated with the nucleus on the |
| | | | | | X chromosome D (Cancer/testis antigen 11.4) |
| | | | | | (CT11.4)(Nuclear-associated protein SPAN-Xd) |
| | | | | | (SPANX-D)(SPANX family member D) |
| 1652 | HLA-A*26:01_EAPGLGGTY | 1392 | ONEC3 | ENSG00000205922 | One cut domain family member 3 (One cut |
| | | | | | homeobox 3)(Transcription factor ONECUT-3) |
| | | | | | (OC-3) |
| 1653 | HLA-B*35:01_MPVPGQQSM | 1393 | AMELY | ENSG00000099721 | Amelogenin, Y isofonn |
| 1654 | HLA-A*02:07_FLEGNPLLLTV | 1271 | H3BVE8 | ENSG00000121446 | Regulator of G-protein-signaling protein-like |
| 1655 | HLA-C*02:02_AESEGTKAV | 1394 | H2BWT | ENSG00000123569 | Histone H2B type W-T (H2B histone family |
| | | | | | member W testis-specific) |
| 1656 | HLA-C*16:01_AESEGTKAV | 1394 | H2BWT | ENSG00000123569 | Histone H2B type W-T (H2B histone family |
| | | | | | member W testis-specific) |
| 1657 | HLA-A*11:01_RVVPPASNMLK | 1395 | CRIS1 | ENSG00000124812 | Cysteine-rich secretory protein 1 (CRISP-1) |
| | | | | | (AEG-like protein)(ARP)(Acidic epididymal |
| | | | | | glycoprotein homolog) |
| 1658 | HLA-A*01:01_TTDDDITTDHY | 1396 | CRIS1 | ENSG00000124812 | Cysteine-rich secretory protein 1 (CRISP-1) |
| | | | | | AEG-like protein)(ARP)(Acidic epididymal |
| | | | | | glycoprotein homolog) |
| 1659 | HLA-C*01:02_VVPPASNML | 1397 | CRIS1 | ENSG00000124812 | Cysteine-rich secretory protein 1 (CRISP-1) |
| | | | | | (AEG-like protein)(ARP)(Acidic epididymal |
| | | | | | glycoprotein homolog) |
| 1660 | HLA-B*51:01_YPVSWSSVI | 1398 | CRIS1 | ENSG00000124812 | Cysteine-rich secretory protein 1 (CRISP-1) |
| | | | | | (AEG-like protein)(ARP)(Acidic epididymal |
| | | | | | glycoprotein homolog) |
| 1661 | HLA-A*03:01_STASIFLAY | 913 | X6R6V8 | ENSG00000143552 | Nuclear pore membrane glycoprotein 210-like |
| 1662 | HLA-B*44:03_AEQLVKTGW | 1348 | OCSTP | ENSG00000149635 | Osteoclast stimulatcuy transmembrane protein |
| | | | | | (OC-STAMP) |
| 1663 | HLA-A*11:01_ATQNAVKLIDK | 1399 | CCD83 | ENSG00000150676 | Coiled-coil domain-containing protein 83 |
| 1664 | HLA-A*01:01_DTDMKYLLY | 1400 | CCD83 | ENSG00000150676 | Coiled-coil domain-containing protein 83 |
| 1665 | HLA-A*33:01_EYKNVGSER | 1401 | CCD83 | ENSG00000150676 | Coiled-coil domain-containing protein 83 |
| 1666 | HLA-A*01:01_GTEFGDTDMKY | 1402 | CCD83 | ENSG00000150676 | Coiled-coil domain-containing protein 83 |
| 1667 | HLA-B*44:03_TEFGDTDMKY | 1403 | CCD83 | ENSG00000150676 | Coiled-coil domain-containing protein 83 |
| 1668 | HLA-C*02:02_KEVDPAGHSY | 1404 | MAGA8 | ENSG00000156009 | Melanoma-associated antigen 8 (Cancer/tests |
| | | | | | antigen 1.8)(CT1.8)(MAGE-8 antigen) |
| 1669 | HLA-A*29:02_IVFSEEFEY | 1405 | SL9C2 | ENSG00000162753 | Sodium/hydrogen exchanger 11 (Na(+)/H(+) |
| | | | | | exchanger 11)(NHE-11)(Solute carrier family 9 |
| | | | | | member 11)(Solute carrier family 9 member C2) |
| 1670 | HLA-B*08:01_DVKMKAVM | 1406 | PLS2 | ENSG00000163746 | Phospholipid scramblase 2 (PL scramblase 2) |
| | | | | | (Ca(2+)-dependent phospholipid scramblase 2) |
| 1671 | HLA-A*29:02_YLYPFNIEY | 1407 | OTOP1 | ENSG00000163982 | Otopetrin-1 |
| 1672 | HLA-A*11:01_SSISNPVLPPK | 1408 | ADAD1 | ENSG00000164113 | Adenosine deaminase domain-containing protein |
| | | | | | 1 (Testis nuclear RNA-binding protein) |
| 1673 | HLA-B*35:01_FPFTYKGSVY | 1409 | ESPB1 | ENSG00000169393 | Epididymal sperm-binding protein 1 (Epididymal |
| | | | | | secretory protein 12)(hE12) |
| 1674 | HLA-A*30:02_STIPGVSAY | 249 | ZPLD1 | ENSG00000170044 | Zona pellucida-like domain-containing protein 1 |
| | | | | | (ZP domain-containing protein 1) |
| 1675 | HLA-A*02:01_HLWDPNPKIGV | 1380 | MRO2B | ENSG00000171495 | Maestro heat-like repeat-containing protein |
| | | | | | family member 2B (HEAT repeat-containing |
| | | | | | protein 7B2)(Sperm PKA-interacting factor) |
| | | | | | (SPIF) |
| 1676 | HLA-B*18:01_DENGQSASY | 1410 | ATS20 | ENSG00000173157 | A disintegrin and metalloproteinase with |
| | | | | | thrombospondin motifs 20 (ADAM-TS 20) |
| | | | | | (ADAM-TS20)(ADAMTS-20)(EC 3.4.24.-) |
| 1677 | HLA-B*44:03_AEVELIDQTL | 1411 | TMPS7 | ENSG00000176040 | Transmembrane protease serine 7 (EC 3.4.21.-) |
| | | | | | (Matriptase-3) |
| 1678 | HLA-B*35:01_LPIRSSILY | 1412 | TMPS7 | ENSG00000176040 | Transmembrane protease serine 7 (EC 3.4.21.-) |
| | | | | | (Matriptase-3) |
| 1679 | HLA-A*11:01_STYGIITSR | 1413 | TMPS7 | ENSG00000176040 | Transmembrane protease serine 7 (EC 3.4.21.-) |
| | | | | | (Matriptase-3) |
| 1680 | HLA-A*31:01_STYGIITSR | 1413 | TMPS7 | ENSG00000176040 | Transmembrane protease serine 7 (EC 3.4.21.-) |
| | | | | | (Matriptase-3) |
| 1681 | HLA-A*11:01_VVADVSNNK | 1414 | TMPS7 | ENSG00000176040 | Transmembrane protease serine 7 (EC 3.4.21.-) |
| | | | | | (Matriptase-3) |
| 1682 | HLA-A*11:01_VVADVSSNNK | 1415 | TMPS7 | ENSG00000176040 | Transmembrane protease serine 7 (EC 3.4.21.-) |
| | | | | | (Matriptase-3) |
| 1683 | HLA-B*18:01_LELATYEL | 1416 | FMR1N | ENSG00000176988 | Fragile X mental retardation 1 neighbor protein |
| | | | | | (Cancer/testis antigen 37)(CT37)(Sarcoma |
| | | | | | antigen NY-SAR-35) |
| 1684 | HLA-A*24:02_NYFIDPVTI | 554 | TR49B | ENSG00000182053 | Putative tripartite motif-containing protein 49B |
| | | | | | (RING finger protein 18B) |
| 1685 | HLA-A*29:02_SIFTGFLLY | 1417 | OTOL1 | ENSG00000182447 | Otolin-1 |
| 1686 | HLA-B*18:01_DESLIYSF | 1418 | TRIML | ENSG00000184108 | Probable E3 ubiquitin-protein ligase TRIML1 |
| | | | | | (EC 2.3.2.27)(RING finger protein 209)(RING- |
| | | | | | type E3 ubiquitin transferase TRIML1)(Tripartite |
| | | | | | motif family-like protein 1) |
| 1687 | HLA-B*44:03_SEDLKSVKY | 1419 | TRIML | ENSG00000184108 | Probable E3 ubiquitin-protein ligase TRIML1 |
| | | | | | (EC 2.3.2.27)(RING finger protein 209)(RING- |
| | | | | | type E3 ubiquitin transferase TRIML1)(Tripartite |
| | | | | | motif family-like protein 1) |
| 1688 | HLA-A*02:07_TLDPATANAYL | 1420 | TRIML | ENSG00000184108 | Probable E3 ubiquitin-protein ligase TRIML1 |
| | | | | | (EC 2.3.2.27)(RING finger protein 209)(RING- |
| | | | | | type E3 ubiquitin transferase TRIML1)(Tripartite |
| | | | | | motif family-like protein 1) |
| 1689 | HLA-A*30:02_VLQSEDEQGSY | 1421 | TRIML | ENSG00000184108 | Probable E3 ubiquitin-protein ligase TRIML1 |
| | | | | | (EC 2.3.2.27)(RING finger protein 209)(RING- |
| | | | | | type E3 ubiquitin transferase TRIML1)(Tripartite |
| | | | | | motif family-like protein 1) |
| 1690 | HLA-A*03:01_RLYSGTARY | 1422 | KCNH7 | ENSG00000184611 | Potassium voltage-gated channel subfamily H |
| | | | | | member 7 (Ether-a-go-go-related gene potassium |
| | | | | | channel 3)(ERG-3)(Eag-related protein 3) |
| | | | | | (Ether-a-go-go-related protein 3)(hERG-3) |
| | | | | | (Voltage-gated potassium channel subunit |
| | | | | | Kv11.3) |
| 1691 | HLA-A*11:01_VTSGEYSLFQK | 1423 | OVCH1 | ENSG00000187950 | Ovochymase-1 (EC 3.4.21.-) |
| 1692 | HLA-A*03:01_NTYASTLYK | 884 | FGF16 | ENSG00000196468 | Fibroblast growth factor 16 (FGF-16) |
| 1693 | HLA-A*03:01_GVHGGILNK | 1424 | PROF3 | ENSG00000196570 | Profilin-3 (Profilin III) |
| 1694 | HLA-A*11:01_GVHGGILNK | 1424 | PROF3 | ENSG00000196570 | Profilin-3 (Profilin III) |
| 1695 | HLA-A*30:02_GGLLGPSHSY | 1425 | DMBX1 | ENSG00000197587 | Diencephalon/mesencephalon homeobox protein |
| | | | | | 1 (Orthodenticle homolog 3)(Paired-like |
| | | | | | homeobox protein DMBX1) |
| 1696 | HLA-A*29:02_TVIDVFYQY | 1426 | HORN | ENSG00000197915 | Homerin |
| 1697 | HLA-A*26:01_EYFPKSVSEY | 1427 | TDR15 | ENSG00000218819 | Tudor domain-containing protein 15 |
| 1698 | HLA-B*35:01_LVASGLATY | 1287 | TDR15 | ENSG00000218819 | Tudor domain-containing protein 15 |
| 1699 | HLA-B*44:03_SETSVSDVNSF | 1155 | TDR15 | ENSG00000218819 | Tudor domain-containing protein 15 |
| 1700 | HLA-A*11:01_ASSQSTPVK | 1428 | MORC1 | ENSG00000114487 | MORC family CW-type zinc finger protein 1 |
| | | | | | (Cancer/testis antigen 33)(CT33) |
| 1701 | HLA-A*11:01_GTMSTISPSK | 1429 | MORC1 | ENSG00000114487 | MORC family CW-type zinc finger protein 1 |
| | | | | | (Cancer/testis antigen 33)(CT33) |
| 1702 | HLA-B*51:01_TPLKWYQSI | 1430 | AMELX | ENSG00000125363 | Amelogenin, X isoform |
| 1703 | HLA-A*02:07_SLPSPGELYAV | 1431 | RNF17 | ENSG00000132972 | RING finger protein 17 (Tudor domain- |
| | | | | | containing protein 4) |
| 1704 | HLA-B*44:02_TEDIGSKGY | 537 | RXFP2 | ENSG00000133105 | Relaxin receptor 2 (G-protein coupled receptor |
| | | | | | 106)(G-protein coupled receptor affecting |
| | | | | | testicular descent)(Leucine-rich repeat- |
| | | | | | containing G-protein coupled receptor 8)(Relaxin |
| | | | | | family peptide receptor 2) |
| 1705 | HLA-C*02:02_TEDIGSKGY | 537 | RXFP2 | ENSG00000133105 | Relaxin receptor 2 (G-protein coupled receptor |
| | | | | | 106)(G-protein coupled receptor affecting |
| | | | | | testicular descent)(Leucine-rich repeat- |
| | | | | | containing G-protein coupled receptor 8)(Relaxin |
| | | | | | family peptide receptor 2) |
| 1706 | HLA-A*11:01_GTEQLTITGK | 1432 | LGSN | ENSG00000146166 | Lengsin (Glutamate-ammonia ligase domain- |
| | | | | | containing protein 1)(Lens glutamine synthase- |
| | | | | | like) |
| 1707 | HLA-A*24:02_LYMQIINFF | 1433 | STRA8 | ENSG00000146857 | Stimulated by retinoic acid gene 8 protein |
| | | | | | homolog |
| 1708 | HLA-A*11:01_SGISQVFQR | 1434 | TRI48 | ENSG00000150244 | Tripartite motif-containing protein 48 (RING |
| | | | | | finger protein 101) |
| 1709 | HLA-B*51:01_DSLPRLTSV | 1435 | CNTP5 | ENSG00000155052 | Contactin-associated protein-like 5 (Cell |
| | | | | | recognition molecule Caspr5) |
| 1710 | HLA-B*44:03_KEVDPAGHSY | 1404 | MAGA8 | ENSG00000156009 | Melanoma-associated antigen 8 (Cancer/testis |
| | | | | | antigen 1.8)(CT1.8)(MAGE-8 antigen) |
| 1711 | HLA-C*02:02_AAASLFEVY | 1167 | OTOP1 | ENSG00000163982 | Otopetrin-1 |
| 1712 | HLA-B*46:01_HAKDIIQSF | 1436 | OTOP1 | ENSG00000163982 | Otopetrin-1 |
| 1713 | HLA-B*18:01_DEEQNLVAF | 380 | PRDM9 | ENSG00000164256 | Histone-lysine N-methyltransferase PRDM9 (EC |
| | | | | | 2.1.1.43)(PR domain zinc finger protein 9)(PR |
| | | | | | domain-containing protein 9) |
| 1714 | HLA-B*44:03_EEAANNGYSW | 1437 | PRDM9 | ENSG00000164256 | Histone-lysine N-methyltransferase PRDM9 (EC |
| | | | | | 2.1.1.43)(PR domain zinc finger protein 9)(PR |
| | | | | | domain-containing protein 9) |
| 1715 | HLA-C*02:02_EEAANNGYSW | 1437 | PRDM9 | ENSG00000164256 | Histone-lysine N-methyltransferase PRDM9 (EC |
| | | | | | 2.1.1.43)(PR domain zinc finger protein 9)(PR |
| | | | | | domain-containing protein 9) |
| 1716 | HLA-B*44:03_EEQNLVAFQY | 382 | PRDM9 | ENSG00000164256 | Histone-lysine N-methyltransferase PRDM9 (EC |
| | | | | | 2.1.1.43)(PR domain zinc finger protein 9)(PR |
| | | | | | domain-containing protein 9) |
| 1717 | HLA-C*16:01_AFSDRTNAL | 1438 | FSHR | ENSG00000170820 | Follicle-stimulating hormone receptor (FSH-R) |
| | | | | | (Follitropin receptor) |
| 1718 | HLA-B*35:01_DAAGFFTVF | 1439 | FSHR | ENSG00000170820 | Follicle-stimulating hormone receptor (FSH-R) |
| | | | | | (Follitropin receptor) |
| 1719 | HLA-B*51:01_DAAGFFTV | 1440 | FSHR | ENSG00000170820 | Follicle-stimulating hormone receptor (FSH-R) |
| | | | | | (Follitropin receptor) |
| 1720 | HLA-B*35:01_FPIFGISSY | 1441 | FSHR | ENSG00000170820 | Follicle-stimulating hormone receptor (FSH-R) |
| | | | | | (Follitropin receptor) |
| 1721 | HLA-C*02:02_AEAALQTLL | 1375 | MRO2B | ENSG00000171495 | Maestro heat-like repeat-containing protein |
| | | | | | family member 2B (HEAT repeat-containing |
| | | | | | protein 7B2)(Sperm PKA-interacting factor) |
| | | | | | (SPIF) |
| 1722 | HLA-B*35:01_EAISQIASF | 1378 | MRO2B | ENSG00000171495 | Maestro heat-like repeat-containing protein |
| | | | | | family member 2B (HEAT repeat-containing |
| | | | | | protein 7B2)(Sperm PKA-interacting factor) |
| | | | | | (SPIF) |
| 1723 | HLA-A*11:01_SVADLTESILK | 638 | LDH6B | ENSG00000171989 | L-lactate dehydrogenase A-like 6B (EC 1.1.1.27) |
| 1724 | HLA-A*02:01_TLWEIQNKLKL | 1442 | LDH6B | ENSG00000171989 | L-lactate dehydrogenase A-like 6B (EC 1.1.1.27) |
| 1725 | HLA-A*03:01_VVNQGKGMFK | 411 | CTSRD | ENSG00000174898 | Cation channel sperm-associated protein subunit |
| | | | | | delta (CatSper-delta)(CatSperdelta) |
| | | | | | (Transmembrane protein 146) |
| 1726 | HLA-A*11:01_ASLTTDGSLK | 1443 | TSYL6 | ENSG00000178021 | Testis-specific Y-encoded-like protein 6 (TSPY- |
| | | | | | like protein 6) |
| 1727 | HLA-B*51:01_LAIAGMNTI | 1444 | OTOL1 | ENSG00000182447 | Otolin-1 |
| 1728 | HLA-A*29:02_LYLFGVTKY | 1445 | PSG9 | ENSG00000183668 | Pregnancy-specific beta-1-glycoprotein 9 (PS- |
| | | | | | beta-G-9)(PSBG-9)(Pregnancy-specific |
| | | | | | glycoprotein 9)(PS34)(Pregnancy-specific beta- |
| | | | | | 1 glycoprotein B)(PS-beta-B)(Pregnancy- |
| | | | | | specific beta-1-glycoprotein 11)(PS-beta-G-11) |
| | | | | | (PSBG-11)(Pregnancy-specific glycoprotein 11) |
| | | | | | (Pregnancy-specific glycoprotein 7)(PSG7) |
| 1729 | HLA-B*35:01_HPIGGDVAL | 1446 | PRS38 | ENSG00000185888 | Serine protease 38 (EC 3.4.21.-)(Marapsin-2) |
| 1730 | HLA-B*51:01_FAYIAGHSI | 1447 | GTR7 | ENSG00000197241 | Solute carrier family 2, facilitated glucose |
| | | | | | transporter member 7 (Glucose transporter type |
| | | | | | 7)(GLUT-7) |
| 1731 | HLA-A*02:07_MVDGAVHWL | 1448 | GTR7 | ENSG00000197241 | Solute carrier family 2, facilitated glucose |
| | | | | | transporter member 7 (Glucose transporter type |
| | | | | | 7)(GLUT-7) |
| 1732 | HLA-A*29:02_IVFGDRFDY | 1449 | CP2AD | ENSG00000197838 | Cytochrome P450 2A13 (EC 1.14.14.1) |
| | | | | | (CYPIIA13) |
| 1733 | HLA-B*44:03_EEIFLAKIEKF | 1450 | X6R7K4 | ENSG00000203910 | Chromosome 1 open reading frame 146 |
| | | | | | (Uncharacterized protein C1orf146) |
| 1734 | HLA-A*11:01_STEEIFLAK | 1451 | X6R7K4 | ENSG00000203910 | Chromosome 1 open reading frame 146 |
| | | | | | (Uncharacterized protein C1orf146) |
| 1735 | HLA-A*24:02_IYSNTLQSI | 1452 | GNAT3 | ENSG00000214415 | Guanine nucleotide-binding protein G(t) subunit |
| | | | | | alpha-3 (Gustducin alpha-3 chain) |
| 1736 | HLA-B*18:01_DEKGTIYDY | 1453 | GPX5 | ENSG00000224586 | Epididymal secretory glutathione peroxidase (EC |
| | | | | | 1.11.1.9)(Epididymis-specific glutathione |
| | | | | | peroxidase-like protein)(EGLP)(Glutathione |
| | | | | | peroxidase 5)(GPx-5)(GSHPx-5) |
| 1737 | HLA-B*18:01_NEYVSFKQY | 1454 | GPX5 | ENSG00000224586 | Epididymal secretcay glutathione peroxidase (EC |
| | | | | | 1.11.1.9)(Epididymis-specific glutathione |
| | | | | | peroxidase-like protein)(EGLP)(Glutathione |
| | | | | | peroxidase 5)(GPx-5)(GSHPx-5) |
| 1738 | HLA-B*44:03_NEYVSFKQY | 1454 | GPX5 | ENSG00000224586 | Epididymal secretoty glutathione peroxidase (EC |
| | | | | | 1.11.1.9)(Epididymis-specific glutathione |
| | | | | | peroxidase-like protein)(EGLP)(Glutathione |
| | | | | | peroxidase 5)(GPx-5)(GSHPx-5) |
| 1739 | HLA-A*11:01_GSGLHQVSK | 1455 | E9PBZ7 | ENSG00000242715 | Coiled-coil domain-containing protein 169 |
| 1740 | HLA-B*44:02_IEAELHISY | 254 | SYCY2 | ENSG00000244476 | Syncytin-2 (Endogenous retrovirus group FRD |
| | | | | | member 1)(Envelope polyprotein)(HERV-FRD) |
| | | | | | (HERV-FRD_6p24.1 provirus ancestral Env |
| | | | | | polyprotein)[Cleaved into: Surface protein (SU); |
| | | | | | Transmembrane protein (TM)] |
| 1741 | HLA-A*26:01_DTTHPISYY | 1456 | GGTL2 | ENSG00000100121 | Gamma-glutamyltransferase light chain 2 |
| | | | | | (Gamma-glutamyltransferase-like protein 4) |
| 1742 | HLA-B*51:01_YAHLTNSSI | 1457 | TTLL2 | ENSG00000120440 | Probable tubulin polyglutamylase TTLL2 (EC 6.- |
| | | | | | .-.-)(Testis-specific protein NYD-TSPG) |
| | | | | | (Tubulin--tyro sine ligase-like protein 2) |
| 1743 | HLA-A*11:01_AQNARIFSK | 1458 | CRIS1 | ENSG00000124812 | Cysteine-rich secretoty protein 1 (CRISP-1) |
| | | | | | (AEG-like protein)(ARP)(Acidic epididymal |
| | | | | | glycoprotein homolog) |
| 1744 | HLA-A*02:01_KLVTDLPNV | 1459 | CRIS1 | ENSG00000124812 | Cysteine-rich secretoty protein 1 (CRISP-1) |
| | | | | | (AEG-like protein)(ARP)(Acidic epididymal |
| | | | | | glycoprotein homolog) |
| 1745 | HLA-C*16:01_SEKEPGQQY | 831 | RHXF2 | ENSG00000131721 | Rhox homeobox family member 2 (Paired-like |
| | | | | | homeobox protein PEPP-2)(Testis homeobox |
| | | | | | gene 1) |
| 1746 | HLA-A*29:02_HVVSGVFFY | 1460 | NMUR2 | ENSG00000132911 | Neuromedin-U receptor 2 (NMU-R2)(G-protein |
| | | | | | coupled receptor FM-4)(G-protein coupled |
| | | | | | receptor TGR-1) |
| 1747 | HLA-A*02:07_YVPIFVVGV | 1461 | NMUR2 | ENSG00000132911 | Neuromeclin-U receptor 2 (NMU-R2)(G-protein |
| | | | | | coupled receptor FM-4)(G-protein coupled |
| | | | | | receptor TGR-1) |
| 1748 | HLA-A*02:07_TVTEKIYYL | 695 | F71F1 | ENSG00000135248 | Protein FAM71F1 (Protein FAM137A)(Testis |
| | | | | | development protein NYD-SP18) |
| 1749 | HLA-B*51:01_SAPEIPTI | 1462 | FNDC7 | ENSG00000143107 | Fibronectin type III domain-containing protein 7 |
| 1750 | HLA-B*18:01_DEVQIEVV | 1463 | X6R6V8 | ENSG00000143552 | Nuclear pore membrane glycoprotein 210-like |
| 1751 | HLA-B*35:01_QPIYQQPAY | 1464 | BOLL | ENSG00000152430 | Protein boule-like |
| 1752 | HLA-A*29:02_IFTSATYLY | 1465 | PANX3 | ENSG00000154143 | Pannexin-3 |
| 1753 | HLA-A*30:02_RSHSLVATY | 1466 | PANX3 | ENSG00000154143 | Pannexin-3 |
| 1754 | HLA-A*29:02_YFEFPLLERY | 1467 | PANX3 | ENSG00000154143 | Pannexin-3 |
| 1755 | HLA-A*11:01_GTNIVVLGVEK | 1468 | PSA7L | ENSG00000154611 | Proteasome subunit alpha type-7-like (EC |
| | | | | | 3.4.25.1) |
| 1756 | HLA-A*30:02_AVKSVGEPKY | 1469 | MEIOB | ENSG00000162039 | Meiosis-specific with OB domain-containing |
| | | | | | protein (EC 3.1.-.-) |
| 1757 | HLA-B*18:01_DETESSFAM | 1470 | MEIOB | ENSG00000162039 | Meiosis-specific with OB domain-containing |
| | | | | | protein (EC 3.1.-.-) |
| 1758 | HLA-C*02:02_FASDVRINF | 1471 | MEIOB | ENSG00000162039 | Meiosis-specific with OB domain-containing |
| | | | | | protein (EC 3.1.-.-) |
| 1759 | HLA-C*16:01_FASDVRINF | 1471 | MEIOB | ENSG00000162039 | Meiosis-specific with OB domain-containing |
| | | | | | protein (EC 3.1.-.-) |
| 1760 | HLA-A*03:01_KVIGIVIGK | 1472 | MEIOB | ENSG00000162039 | Meiosis-specific with OB domain-containing |
| | | | | | protein (EC 3.1.-.-) |
| 1761 | HLA-A*11:01_KVIGIVIGK | 1472 | MEIOB | ENSG00000162039 | Meiosis-specific with OB domain-containing |
| | | | | | protein (EC 3.1.-.-) |
| 1762 | HLA-C*04:01_LYDETESSF | 1473 | MEIOB | ENSG00000162039 | Meiosis-specific with OB domain-containing |
| | | | | | protein (EC 3.1.-.-) |
| 1763 | HLA-A*02:07_SLDFKSVFL | 1474 | MEIOB | ENSG00000162039 | Meiosis-specific with OB domain-containing |
| | | | | | protein (EC 3.1.-.-) |
| 1764 | HLA-B*51:01_YAYISTLNI | 1475 | MEIOB | ENSG00000162039 | Meiosis-specific with OB domain-containing |
| | | | | | protein (EC 3.1.-.-) |
| 1765 | HLA-B*44:03_DEYGQELGIKW | 1476 | PRDM9 | ENSG00000164256 | Histone-lysine N-methyltransferase PRDM9 (EC |
| | | | | | 2.1.1.43)(PR domain zinc finger protein 9)(PR |
| | | | | | domain-containing protein 9) |
| 1766 | HLA-B*44:03_SEAVSVLHHW | 1477 | SPT19 | ENSG00000166118 | Spermatogenesis-associated protein 19, |
| | | | | | mitochondrial (Spermatogenic cell-specific gene |
| | | | | | 1 protein)(Spergen-1) |
| 1767 | HLA-A*11:01_STLDLANTLQK | 1478 | MB3L1 | ENSG00000170948 | Methyl-CpG-binding domain protein 3-like 1 |
| | | | | | (MBD 3-like protein 1) |
| 1768 | HLA-B*44:03_QEAAENYRKLF | 1479 | TRIMM | ENSG00000179046 | Probable E3 ubiquitin-protein ligase TRIML2 |
| | | | | | (EC 2.3.2.27)(RING-type E3 ubiquitin |
| | | | | | transferase TRIML2)(SPRY domain-containing |
| | | | | | protein 6)(Tripartite motif family-like protein 2) |
| 1769 | HLA-A*24:02_EYLFDTHTL | 1480 | FTMT | ENSG00000181867 | Ferritin, mitochondrial (EC 1.16.3.1) |
| 1770 | HLA-A*24:02_VYLSMAYYF | 1481 | FTMT | ENSG00000181867 | Ferritin, mitochondrial (EC 1.16.3.1) |
| 1771 | HLA-A*03:01_QTLGIPLTPK | 1482 | H0YFA1 | ENSG00000185958 | Protein FAM186A (Fragment) |
| 1772 | HLA-A*29:02_LFSPITQQLRY | 1483 | CS067 | ENSG00000188032 | UPF0575 protein C19orf67 |
| 1773 | HLA-A*02:01_ALAPLLMTL | 1484 | S22AO | ENSG00000197658 | Solute carrier family 22 member 24 |
| 1774 | HLA-A*30:02_AAHPIGLVY | 1485 | DPRX | ENSG00000204595 | Divergent paired-related homeobox |
| 1775 | HLA-A*30:02_SVTTYTGSY | 530 | CD051 | ENSG00000237136 | Uncharacterized protein C4orf51 |
| 1776 | HLA-B*44:03_AENGLLEKI | 1486 | ASIC5 | ENSG00000256394 | Acid-sensing ion channel 5 (ASIC5)(Amiloride- |
| | | | | | sensitive cation channel 5)(Human intestine |
| | | | | | Na(+) channel)(HINaC) |
| 1777 | HLA-B*44:03_EEIEYPATISY | 1487 | ASIC5 | ENSG00000256394 | Acid-sensing ion channel 5 (ASIC5)(Amiloride- |
| | | | | | sensitive cation channel 5)(Human intestine |
| | | | | | Na(+) channel)(HINaC) |
| 1778 | HLA-B*18:01_IEYPATISY | 1488 | ASIC5 | ENSG00000256394 | Acid-sensing ion channel 5 (ASIC5)(Amiloride- |
| | | | | | sensitive cation channel 5)(Human intestine |
| | | | | | Na(+) channel)(HINaC) |
| 1779 | HLA-B*18:01_MEFPAVTF | 1489 | ASIC5 | ENSG00000256394 | Acid-sensing ion channel 5 (ASIC5)(Amiloride- |
| | | | | | sensitive cation channel 5)(Human intestine |
| | | | | | Na(+) channel)(HINaC) |
| 1780 | HLA-A*11:01_ASQLHTLIK | 1490 | DUXA | ENSG00000258873 | Double homeobox protein A |
| 1781 | HLA-B*44:02_EEQLKILINTF | 1491 | DUXA | ENSG00000258873 | Double homeobox protein A |
| 1782 | HLA-A*31:01_RIQIWFQNR | 1492 | DUXA | ENSG00000258873 | Double homeobox protein A |
| 1783 | HLA-A*31:01_RVQIWFQNR | 1493 | DUXA | ENSG00000258873 | Double homeobox protein A |
| 1784 | HLA-A*11:01_GIADPNQSAK | 1251 | ADAM7 | ENSG00000069206 | Disintegrin and metalloproteinase domain- |
| | | | | | containing protein 7 (ADAM 7)(Sperm |
| | | | | | maturation-related glycoprotein GP-83) |
| 1785 | HLA-A*29:02_GLNQLYFYY | 1494 | TRPC5 | ENSG00000072315 | Short transient receptor potential channels |
| | | | | | (TIpC5)(Transient receptor protein 5)(TRP-5) |
| | | | | | (hTRP-5)(hTRP5) |
| 1786 | HLA-B*35:01_HAISSAGVMY | 1495 | WNT8B | ENSG00000075290 | Protein Wnt-8b |
| 1787 | HLA-A*26:01_EVAQSNSAF | 1496 | SEIL2 | ENSG00000101251 | Protein sel-1 homolog 2 (Suppressor of lin-12- |
| | | | | | like protein 2)(Sel-1L2) |
| 1788 | HLA-A*02:07_ATDSFHTEL | 1497 | DKKL1 | ENSG00000104901 | Dickkopf-like protein 1 (Cancer/testis antigen 34) |
| | | | | | (CT34)(Protein soggy-1)(SGY-1) |
| 1789 | HLA-A*24:02_IYAPPNNRF | 1498 | GCNT7 | ENSG00000124091 | Beta-1,3-galactosyl-O-glycosyl-glycoprotein |
| | | | | | beta-1,6-N-acetylglucosaminyltransferase 7 (EC |
| | | | | | 2.4.1.-) |
| 1790 | HLA-B*51:01_VPAQQPVI | 1499 | AMELX | ENSG00000125363 | Amelogenin, X isoform |
| 1791 | HLA-B*18:01_DESTILHL | 1500 | CCD83 | ENSG00000150676 | Coiled-coil domain-containing protein 83 |
| 1792 | HLA-B*44:03_MEGPFFRDY | 1501 | IZUM2 | ENSG00000161652 | Izumo sperm-egg fusion protein 2 |
| 1793 | HLA-B*35:01_DPAVFQLVY | 1502 | KCNV2 | ENSG00000168263 | Potassium voltage-gated channel subfamily V |
| | | | | | member 2 (Voltage-gated potassium channel |
| | | | | | subunit Kv8.2) |
| 1794 | HLA-A*11:01_GSYSNNSTEK | 1503 | MRO2B | ENSG00000171495 | Maestro heat-like repeat-containing protein |
| | | | | | family member 2B (HEAT repeat-containing |
| | | | | | protein 7B2)(Sperm PKA-interacting factor) |
| | | | | | (SPIF) |
| 1795 | HLA-A*11:01_ATAQKLKKK | 1504 | WDR87 | ENSG00000171804 | WD repeat-containing protein 87 (Testis |
| | | | | | development protein NYD-SP11) |
| 1796 | HLA-A*29:02_GTATLLIVRY | 1505 | UROL1 | ENSG00000177398 | Uromodulin-like 1 (Olfactorin) |
| 1797 | HLA-A*11:01_ATAGARSKVK | 1506 | MAGBA | ENSG00000177689 | Melanoma-associated antigen B10 (MAGE-B10 |
| | | | | | antigen) |
| 1798 | HLA-A*11:01_GTNGFQLLR | 1049 | SG11A | ENSG00000178287 | Sperm-associated antigen 11A (Human |
| | | | | | epididymis-specific protein 2)(He2)(Protein |
| | | | | | EP2)(Sperm antigen HE2) |
| 1799 | HLA-A*02:07_LLPPRTPPYQV | 1050 | SG11A | ENSG00000178287 | Sperm-associated antigen 11A (Human |
| | | | | | epididymis-specific protein 2)(He2)(Protein |
| | | | | | EP2)(Sperm antigen HE2) |
| 1800 | HLA-B*51:01_VPLGIRNTI | 1507 | SG11A | ENSG00000178287 | Sperm-associated antigen 11A (Human |
| | | | | | epididymis-specific protein 2)(He2)(Protein |
| | | | | | EP2)(Sperm antigen HE2) |
| 1801 | HLA-B*46:01_ILRPPVEAY | 1508 | FA71C | ENSG00000180219 | Protein FAM71C |
| 1802 | HLA-A*02:01_VLSAVTPEL | 1509 | SAGE1 | ENSG00000181433 | Sarcoma antigen 1 (Cancer/testis antigen 14) |
| | | | | | (CT14) |
| 1803 | HLA-A*02:07_VVPPWNPQL | 1510 | ADIG | ENSG00000182035 | Adipogenin |
| 1804 | HLA-B*44:03_DEYGNTTLHY | 1039 | D7UEQ8 | ENSG00000183206 | POTE ankyrin domain family member C |
| 1805 | HLA-A*11:01_SQDEILINK | 1511 | D7UEQ8 | ENSG00000183206 | POTE ankyrin domain family member C |
| 1806 | HLA-A*01:01_FSDFGLLWY | 1512 | NALP9 | ENSG00000185792 | NACHT, LRR and PYD domains-containing |
| | | | | | protein 9 (Nucleotide-binding oligomerization |
| | | | | | domain protein 6)(PYRIN and NACHT- |
| | | | | | containing protein 12) |
| 1807 | HLA-B*46:01_NAITGSAF | 1513 | DCC | ENSG00000187323 | Netrin receptor DCC (Colorectal cancer |
| | | | | | suppressor)(Immunoglobulin superfamily DCC |
| | | | | | subclass member 1)(Tumor suppressor protein |
| | | | | | DCC) |
| 1808 | HLA-B*46:01_FAFEKDVEM | 1116 | H9KVA5 | ENSG00000187959 | Putative cleavage and polyadenylation-specificity |
| | | | | | factor subunit 4-like protein |
| 1809 | HLA-B*44:03_SEYPIIFVY | 1514 | SPXN3 | ENSG00000189252 | Sperm protein associated with the nucleus on the |
| | | | | | X chromosome N3 (Nuclear-associated protein |
| | | | | | SPAN-Xn3)(SPANX-N3)(SPANX family |
| | | | | | member N3) |
| 1810 | HLA-A*01:01_GSDFGHSSSY | 1515 | HORN | ENSG00000197915 | Hornerin |
| 1811 | HLA-B*44:02_EEETLKTLY | 1215 | Q5VXJ5 | ENSG00000198765 | Synaptonemal complex protein 1 (Fragment) |
| 1812 | HLA-A*26:01_ETPSETPTY | 1516 | F8W8N9 | ENSG00000204930 | Protein FAM221B (Fragment) |
| 1813 | HLA-A*01:01_ISETPSETPTY | 1517 | F8W8N9 | ENSG00000204930 | Protein FAM221B (Fragment) |
| 1814 | HLA-B*44:03_SETPSETPTY | 1518 | F8W8N9 | ENSG00000204930 | Protein FAM221B (Fragment) |
| 1815 | HLA-B*44:03_EEVARFLTYY | 1519 | 1A1L2 | ENSG00000205126 | Probable inactive 1-aminocyclopropane-1- |
| | | | | | carboxylate synthase-like protein 2 (ACC |
| | | | | | synthase-like protein 2) |
| 1816 | HLA-A*29:02_STLPTTINY | 31 | MAGAC | ENSG00000213401 | Melanoma-associated antigen 12 (Cancer/testis |
| | | | | | antigen 1.12)(CT1.12)(MAGE-12 antigen) |
| | | | | | (MAGE12F antigen) |
| 1817 | HLA-B*44:03_SEAPSLPVVF | 1520 | GRCR1 | ENSG00000215203 | Glutaredoxin domain-containing cysteine-rich |
| | | | | | protein 1 |
| 1818 | HLA-A*30:02_GTGQVSSTY | 1521 | A0A1B0GTN1 | ENSG00000224960 | Putative SMEK homolog 3 |
| 1819 | HLA-A*29:02_HFLFLFLLY | 1522 | PATE3 | ENSG00000236027 | Prostate and testis expressed protein 3 |
| | | | | | (Acrosomal vesicle protein HEL-127)(PATE-like |
| | | | | | protein DJ)(PATE-DJ) |
| 1820 | HLA-B*18:01_MEYLTQAAF | 1523 | BHMG1 | ENSG00000237452 | Basic helix-loop-helix and HMG box domain- |
| | | | | | containing protein 1 |
| 1821 | HLA-B*27:02_GTGTGIAGITK | 253 | SYCY2 | ENSG00000244476 | Syncytin-2 (Endogenous retrovirus group FRD |
| | | | | | member 1)(Envelope polyprotein)(HERV-FRD) |
| | | | | | (HERV-FRD_6p24.1 provirus ancestral Env |
| | | | | | polyprotein)[Cleaved into: Surface protein (SU); |
| | | | | | Transmembrane protein (TM)] |
| 1822 | HLA-B*44:02_VEVGEVKSW | 401 | RFPLB | ENSG00000251258 | Ret finger protein-like 4B (RING finger protein |
| | | | | | 211) |
| 1823 | HLA-A*01:01_WTDGSSYDY | 1524 | CL19A | ENSG00000261210 | C-type lectin domain family 19 member A |
| 1824 | HLA-B*44:03_EEFLDGEHW | 1525 | CALR3 | ENSG00000269058 | Calreticulin-3 (Calreticulin-2)(Calsperin) |
| 1825 | HLA-B*44:03_SEFENIGAIGL | 1526 | CALR3 | ENSG00000269058 | Calreticulin-3 (Calreticulin-2)(Calsperin) |
| 1826 | HLA-A*02:01_GLSEVISVV | 1527 | TRPC7 | ENSG00000069018 | Short transient receptor potential channel 7 |
| | | | | | (TipC7)(Transient receptor protein 7)(TRP-7) |
| | | | | | (hTRP7) |
| 1827 | HLA-B*44:03_IETEFKNDY | 886 | TRPC7 | ENSG00000069018 | Short transient receptor potential channel 7 |
| | | | | | (TipC7)(Transient receptor protein 7)(TRP-7) |
| | | | | | (hTRP7) |
| 1828 | HLA-A*24:02_IYANISGHL | 1528 | ADAM2 | ENSG00000104755 | Disintegrin and metalloproteinase domain- |
| | | | | | containing protein 2 (ADAM 2)(Cancer/testis |
| | | | | | antigen 15)(CT15)(Fertilin subunit beta)(PH- |
| | | | | | 30)(PH30)(PH30-beta) |
| 1829 | HLA-A*1101_AVYENELVATR | 1529 | ZP4 | ENSG00000116996 | Zona pellucida sperm-binding protein 4 (Zona |
| | | | | | pellucida glycoprotein 4)(Zp-4)(Zona pellucida |
| | | | | | protein B)[Cleaved into: Processed zona |
| | | | | | pellucida sperm-binding protein 41 |
| 1830 | HLA-B*44:03_NEIVATIKF | 1530 | SACA1 | ENSG00000118434 | Sperm acrosome membrane-associated protein 1 |
| | | | | | (Sperm acrosomal membrane-associated protein |
| | | | | | 32) |
| 1831 | HLA-A*30:02_AQNARIFSKY | 1531 | CRIS1 | ENSG00000124812 | Cysteine-rich secretory protein 1 (CRISP-1) |
| | | | | | (AEG-like protein)(ARP)(Acidic epididymal |
| | | | | | glycoprotein homotog) |
| 1832 | HLA-B*44:03_EEIVNIHNAL | 1532 | CRIS1 | ENSG00000124812 | Cysteine-rich secretory protein 1 (CRISP-1) |
| | | | | | (AEG-like protein)(ARP)(Acidic epididymal |
| | | | | | glycoprotein homolog) |
| 1833 | HLA-A*03:01_RVVPPASNMLK | 1395 | CRIS1 | ENSG00000124812 | Cysteine-rich secretory protein 1 (CRISP-1) |
| | | | | | (AEG-like protein)(ARP)(Acidic epididymal |
| | | | | | glycoprotein homolog) |
| 1834 | HLA-A*03:01_AINLVTKGINK | 1533 | BAFL | ENSG00000125888 | Barrier-to-autointegration factor-like protein |
| | | | | | (BAF-L)(Barrier-to-autointegration factor 2) |
| 1835 | HLA-A*11:01_AINLVTKGINK | 1533 | BAFL | ENSG00000125888 | Barrier-to-autointegration factor-like protein |
| | | | | | (BAF-L)(Barrier-to-autointegration factor 2) |
| 1836 | HLA-A*02:07_WVDGISHEL | 1534 | BAFL | ENSG00000125888 | Barrier-to-autointegration factor-like protein |
| | | | | | (BAF-L)(Barrier-to-autointegration factor 2) |
| 1837 | HLA-A*02:07_KLDQTTMNV | 1535 | MMP20 | ENSG00000137674 | Matrix metalloproteinase-20 (MMP-20)(EC |
| | | | | | 3.4.24.-)(Enamel metalloproteinase) |
| | | | | | (Enamelysin) |
| 1838 | HLA-A*29:02_YFFSGPKTY | 1536 | MMP20 | ENSG00000137674 | Matrix metalloproteinase-20 (MMP-20)(EC |
| | | | | | 3.4.24.-)(Enamel metalloproteinase) |
| | | | | | (Enamelysin) |
| 1839 | HLA-A*02:01_TLIETTAEA | 1537 | NDST4 | ENSG00000138653 | Bifunctional heparan sulfate N-deacetylase/N- |
| | | | | | sulfotransferase 4 (EC 2.8.2.8)(Glucosaminyl N- |
| | | | | | deacetylase/N-sulfotransferase 4)(NDST-4)(N- |
| | | | | | heparan sulfate sulfotransferase 4)(N-HSST 4) |
| | | | | | [Includes: Heparan sulfate N-deacetylase 4 (EC |
| | | | | | 3.-.-.-); Heparan sulfate N-sulfotransferase 4 (EC |
| | | | | | 2.8.2.-)] |
| 1840 | HLA-A*02:01_FLWRGNVVL | 1538 | TRI43 | ENSG00000144015 | Tripartite motif-containing protein 43 |
| 1841 | HLA-B*18:01_QEVITTVY | 1539 | ZAN | ENSG00000146839 | Zonadhesin |
| 1842 | HLA-B*44:02_AEQLVKTGW | 1348 | OCSTP | ENSG00000149635 | Osteoclast stimulatory transmembrane protein |
| | | | | | (OC-STAMP) |
| 1843 | HLA-A*11:01_AVDIVSQSK | 1540 | PO4F2 | ENSG00000151615 | POU domain, class 4, transcription factor 2 |
| | | | | | (Brain-specific homeobox/POU domain protein |
| | | | | | 3B)(Brain-3B)(Brn-3B) |
| 1844 | HLA-B*18:01_EESSINYTF | 1329 | J3KNE0 | ENSG00000153165 | RanBP2-like and GRIP domain-containing |
| | | | | | protein 3 |
| 1845 | HLA-A*02:07_KLPVPLESV | 1541 | J3KNE0 | ENSG00000153165 | RanBP2-like and GRIP domain-containing |
| | | | | | protein 3 |
| 1846 | HLA-B*35:01_TAFGDLEVF | 1542 | ASZ1 | ENSG00000154438 | Ankyrin repeat, SAM and basic leucine zipper |
| | | | | | domain-containing protein 1 (Ankyrin-like |
| | | | | | protein 1)(Germ cell-specific ankyrin, SAM and |
| | | | | | basic leucine zipper domain-containing protein) |
| 1847 | HLA-A*01:01_KTELETALYY | 1543 | GG6L2 | ENSG00000174450 | Golgin subfamily A member 6-like protein 2 |
| 1848 | HLA-B*18:01_TELETALYY | 1544 | GG6L2 | ENSG00000174450 | Golgin subfamily A member 6-like protein 2 |
| 1849 | HLA-A*26:01_ESIPESSLY | 1545 | UROL1 | ENSG00000177398 | Uromodulin-like 1 (Olfactorin) |
| 1850 | HLA-A*02:01_ALAESVAQL | 1546 | A3LT2 | ENSG00000184389 | Alpha-1,3-galactosyltransferase 2 (EC 2.4.1.87) |
| | | | | | (Isoglobotriaosylceramide synthase)(iGb3 |
| | | | | | synthase)(iGb3S) |
| 1851 | HLA-B*51:01_LAYLVGQSI | 1547 | PIWL3 | ENSG00000184571 | Piwi-like protein 3 |
| 1852 | HLA-A*29:02_IVLPVWLNY | 1548 | VHLL | ENSG00000189030 | Von Hippel-Lindau-like protein (VHL-like |
| | | | | | protein)(VLP) |
| 1853 | HLA-A*29:02_AAHPIGLVY | 1485 | DPRX | ENSG00000204595 | Divergent paired-related homeobox |
| 1854 | HLA-B*35:01_EPLSVTAKY | 874 | VCX3B | ENSG00000205642 | Variable charge X-linked protein 3B (Variably |
| | | | | | charged protein X-C)(VCX-C) |
| 1855 | HLA-A*11:01_ATMGKLASK | 1549 | LEUTX | ENSG00000213921 | Leucine-twenty homeobox |
| 1856 | HLA-A*29:02_IITDLSLYY | 1550 | M4A18 | ENSG00000214782 | Membrane-spanning 4-domains subfamily A |
| | | | | | member 18 |
| 1857 | HLA-A*31:01_QSQPIGYQR | 1551 | M4A18 | ENSG00000214782 | Membrane-spanning 4-domains subfamily A |
| | | | | | member 18 |
| 1858 | HLA-A*30:02_KNIALNGEY | 1552 | GRCR1 | ENSG00000215203 | Glutaredoxin domain-containing cysteine-rich |
| | | | | | protein 1 |
| 1859 | HLA-A*29:02_LFLFGVTKY | 1313 | PSG11 | ENSG00000243130 | Pregnancy-specific beta-1-glycoprotein 11 (PS- |
| | | | | | beta-G-11)(PSBG-11)(Pregnancy-specific |
| | | | | | glycoprotein 11)(Pregnancy-specific beta-1- |
| | | | | | glycoprotein 13)(PS-beta-G-13)(PSBG-13) |
| | | | | | (Pregnancy-specific glycoprotein 13) |
| 1860 | HLA-B*51:01_YPKLPMPYI | 1553 | PSG11 | ENSG00000243130 | Pregnancy-specific beta-1-glycoprotein 11 (PS- |
| | | | | | beta-G-11)(PSBG-11)(Pregnancy-specific |
| | | | | | glycoprotein 11)(Pregnancy-specific beta-1- |
| | | | | | glycoprotein 13)(PS-beta-G-13)(PSBG-13) |
| | | | | | (Pregnancy-specific glycoprotein 13) |
| 1861 | HLA-A*24:02_VYIPGSNATL | 1554 | PCDG8 | ENSG00000253767 | Protocadherin gamma-A8 (PCDH-gamma-A8) |
| 1862 | HLA-A*03:01_KVYAENGLLEK | 1555 | ASIC5 | ENSG00000256394 | Acid-sensing ion channel 5 (ASIC5)(Amiloride- |
| | | | | | sensitive cation channel 5)(Human intestine |
| | | | | | Na(+) channel)(HINaC) |
| 1863 | HLA-B*44:03_AEFIESGQY | 1556 | TAF7L | ENSG00000102387 | Transcription initiation factor TFIID subunit 7- |
| | | | | | like (Cancer/testis antigen 40)(CT40)(RNA |
| | | | | | polymerase II TBP-associated factor subunit Q) |
| | | | | | (TATA box-binding protein-associated factor 50 |
| | | | | | kDa)(Transcription initiation factor TFIID 50 |
| | | | | | kDa subunit) |
| 1864 | HLA-A*11:01_ASTDPNIVRK | 1557 | TAF7L | ENSG00000102387 | Transcription initiation factor TFIID subunit 7- |
| | | | | | like (Cancer/testis antigen 40)(CT40)(RNA |
| | | | | | polymerase II TBP-associated factor subunit Q) |
| | | | | | (TATA box-binding protein-associated factor 50 |
| | | | | | kDa)(Transcription initiation factor TFIID 50 |
| | | | | | kDa subunit) |
| 1865 | HLA-A*11:01_STDPNIVRKK | 1558 | TAF7L | ENSG00000102387 | Transcription initiation factor TFIID subunit 7- |
| | | | | | like (Cancer/testis antigen 40)(CT40)(RNA |
| | | | | | polymerase II TBP-associated factor subunit Q) |
| | | | | | (TATA box-binding protein-associated factor 50 |
| | | | | | kDa)(Transcription initiation factor TFIID 50 |
| | | | | | kDa subunit) |
| 1866 | HLA-A*11:01_STDPNIVRK | 1559 | TAF7L | ENSG00000102387 | Transcription initiation factor TFIID subunit 7- |
| | | | | | like (Cancer/testis antigen 40)(CT40)(RNA |
| | | | | | polymerase II TBP-associated factor subunit Q) |
| | | | | | (TATA box-binding protein-associated factor 50 |
| | | | | | kDa)(Transcription initiation factor TFIID 50 |
| | | | | | kDa subunit) |
| 1867 | HLA-A*03:01_AVSPPASNMLK | 1560 | CRIS2 | ENSG00000124490 | Cysteine-rich secretory protein 2 (CRISP-2) |
| | | | | | (Cancer/testis antigen 36)(CT36)(Testis-specific |
| | | | | | protein TPX-1) |
| 1868 | HLA-A*11:01_AVSPPASNMLK | 1560 | CRIS2 | ENSG00000124490 | Cysteine-rich secretory protein 2 (CRISP-2) |
| | | | | | (Cancer/testis antigen 36)(CT36)(Testis-specific |
| | | | | | protein TPX-1) |
| 1869 | HLA-B*18:01_DEILDFVY | 1561 | CRIS2 | ENSG00000124490 | Cysteine-rich secretory protein 2 (CRISP-2) |
| | | | | | (Cancer/testis antigen 36)(CT36)(Testis-specific |
| | | | | | protein TPX-1) |
| 1870 | HLA-B*51:01_DPTSWSSAI | 1562 | CRIS2 | ENSG00000124490 | Cysteine-rich secretory protein 2 (CRISP-2) |
| | | | | | (Cancer/testis antigen 36)(CT36)(Testis-specific |
| | | | | | protein TPX-1) |
| 1871 | HLA-B*35:01_LPAEGKDPAF | 1563 | CRIS2 | ENSG00000124490 | Cysteine-rich secretory protein 2 (CRISP-2) |
| | | | | | (Cancer/testis antigen 36)(CT36)(Testis-specific |
| | | | | | protein TPX-1) |
| 1872 | HLA-B*51:01_LPVLFLVTV | 1564 | CRIS2 | ENSG00000124490 | Cysteine-rich secretory protein 2 (CRISP-2) |
| | | | | | (Cancer/testis antigen 36)(CT36)(Testis-specific |
| | | | | | protein TPX-1) |
| 1873 | HLA-C*01:02_VSPPASNML | 1565 | CRIS2 | ENSG00000124490 | Cysteine-rich secretory protein 2 (CRISP-2) |
| | | | | | (Cancer/testis antigen 36)(CT36)(Testis-specific |
| | | | | | protein TPX-1) |
| 1874 | HLA-C*02:02_AEFIESGQY | 1556 | TAF7L | ENSG00000102387 | Transcription initiation factor TFIID subunit 7- |
| | | | | | like (Cancer/testis antigen 40)(CT40)(RNA |
| | | | | | polymerase II TBP-associated factor subunit Q) |
| | | | | | (TATA box-binding protein-associated factor 50 |
| | | | | | kDa)(Transcription initiation factor TFIID 50 |
| | | | | | kDa subunit) |
| 1875 | HLA-A*03:01_STDPNIVRKK | 1558 | TAF7L | ENSG00000102387 | Transcription initiation factor TFIID subunit 7- |
| | | | | | like (Cancer/testis antigen 40)(CT40)(RNA |
| | | | | | polymerase II TBP-associated factor subunit Q) |
| | | | | | (TATA box-binding protein-associated factor 50 |
| | | | | | kDa)(Transcription initiation factor TFIID 50 |
| | | | | | kDa subunit) |
| 1876 | HLA-B*44:03_REVTTNAQRW | 1566 | CRIS2 | ENSG00000124490 | Cysteine-rich secretory protein 2 (CRISP-2) |
| | | | | | (Cancer/testis antigen 36)(CT36)(Testis-specific |
| | | | | | protein TPX-1) |
| Target | Gene Name | Gene ID | Peptide | SEQ ID NO | HLA |
| 1877 | AFP | ENSG00000081051 | AADIIIGHL | 1567 | HLA-A*02:07 |
| 1878 | AFP | ENSG00000081051 | AADIIIGHL | 1567 | HLA-A*68:02 |
| 1879 | AFP | ENSG00000081051 | AADIIIGHL | 1567 | HLA-B*38:01 |
| 1880 | AFP | ENSG00000081051 | AADIIIGHL | 1567 | HLA-B*40:01 |
| 1881 | AFP | ENSG00000081051 | AADIIIGHL | 1567 | HLA-C*02:02 |
| 1882 | AFP | ENSG00000081051 | AADIIIGHL | 1567 | HLA-C*05:01 |
| 1883 | AFP | ENSG00000081051 | AATVTKELR | 1568 | HLA-A*68:01 |
| 1884 | AFP | ENSG00000081051 | AATVTKELR | 1568 | HLA-C*07:06 |
| 1885 | AFP | ENSG00000081051 | AATVTKEL | 1569 | HLA-A*32:01 |
| 1886 | AFP | ENSG00000081051 | AATVTKEL | 1569 | HLA-B*08:01 |
| 1887 | AFP | ENSG00000081051 | AATVTKEL | 1569 | HLA-B*46:01 |
| 1888 | AFP | ENSG00000081051 | AATVTKEL | 1569 | HLA-B*58:01 |
| 1889 | AFP | ENSG00000081051 | AATVTKEL | 1569 | HLA-C*01:02 |
| 1890 | AFP | ENSG00000081051 | AATVTKEL | 1569 | HLA-C*03:03 |
| 1891 | AFP | ENSG00000081051 | AATVTKEL | 1569 | HLA-C*03:04 |
| 1892 | AFP | ENSG00000081051 | AATVTKEL | 1569 | HLA-C*05:01 |
| 1893 | AFP | ENSG00000081051 | AATVTKEL | 1569 | HLA-C*12:03 |
| 1894 | AFP | ENSG00000081051 | AATVTKEL | 1569 | HLA-C*14:02 |
| 1895 | AFP | ENSG00000081051 | AATVTKEL | 1569 | HLA-C*16:01 |
| 1896 | AFP | ENSG00000081051 | AATVTKEL | 1569 | HLA-C*16:02 |
| 1897 | AFP | ENSG00000081051 | AATVTKEL | 1569 | HLA-C*16:04 |
| 1898 | AFP | ENSG00000081051 | ADFSGLLEK | 1570 | HLA-A*03:01 |
| 1899 | AFP | ENSG00000081051 | ADFSGLLEK | 1570 | HLA-A*03:02 |
| 1900 | AFP | ENSG00000081051 | ADFSGLLEK | 1570 | HLA-A*11:01 |
| 1901 | AFP | ENSG00000081051 | ADFSGLLEK | 1570 | HLA-B*27:02 |
| 1902 | AFP | ENSG00000081051 | ADFSGLLEK | 1570 | HLA-B*27:05 |
| 1903 | AFP | ENSG00000081051 | ADIIIGHL | 1571 | HLA-A*30:01 |
| 1904 | AFP | ENSG00000081051 | ADIIIGHL | 1571 | HLA-B*37:01 |
| 1905 | AFP | ENSG00000081051 | ADIIIGHL | 1571 | HLA-B*40:02 |
| 1906 | AFP | ENSG00000081051 | ADIIIGHL | 1571 | HLA-B*44:02 |
| 1907 | AFP | ENSG00000081051 | ADLATIFF | 1572 | HLA-B*37:01 |
| 1908 | AFP | ENSG00000081051 | AEEGQKLI | 1573 | HLA-B*44:02 |
| 1909 | AFP | ENSG00000081051 | AEEGQKLI | 1573 | HLA-B*44:03 |
| 1910 | AFP | ENSG00000081051 | AEEGQKLI | 1573 | HLA-B*49:01 |
| 1911 | AFP | ENSG00000081051 | AEISLADLATI | 1574 | HLA-A*30:01 |
| 1912 | AFP | ENSG00000081051 | AEISLADLATI | 1574 | HLA-B*40:01 |
| 1913 | AFP | ENSG00000081051 | AEISLADLATI | 1574 | HLA-B*44:02 |
| 1914 | AFP | ENSG00000081051 | AEISLADLATI | 1574 | HLA-B*44:03 |
| 1915 | AFP | ENSG00000081051 | AEISLADLATI | 1574 | HLA-B*49:01 |
| 1916 | AFP | ENSG00000081051 | AEISLADLA | 1575 | HLA-A*30:01 |
| 1917 | AFP | ENSG00000081051 | AEISLADLA | 1575 | HLA-B*40:01 |
| 1918 | AFP | ENSG00000081051 | AEISLADLA | 1575 | HLA-B*40:02 |
| 1919 | AFP | ENSG00000081051 | AEISLADLA | 1575 | HLA-B*49:01 |
| 1920 | AFP | ENSG00000081051 | AEISLADL | 1576 | HLA-A*30:01 |
| 1921 | AFP | ENSG00000081051 | AEISLADL | 1576 | HLA-B*37:01 |
| 1922 | AFP | ENSG00000081051 | AEISLADL | 1576 | HLA-B*40:01 |
| 1923 | AFP | ENSG00000081051 | AEISLADL | 1576 | HLA-B*44:03 |
| 1924 | AFP | ENSG00000081051 | AEISLADL | 1576 | HLA-B*49:01 |
| 1925 | AFP | ENSG00000081051 | AENAVECF | 1577 | HLA-A*30:01 |
| 1926 | AFP | ENSG00000081051 | AENAVECF | 1577 | HLA-B*18:01 |
| 1927 | AFP | ENSG00000081051 | AENAVECF | 1577 | HLA-B*27:02 |
| 1928 | AFP | ENSG00000081051 | AENAVECF | 1577 | HLA-B*37:01 |
| 1929 | AFP | ENSG00000081051 | AENAVECF | 1577 | HLA-B*44:02 |
| 1930 | AFP | ENSG00000081051 | AENAVECF | 1577 | HLA-B*44:03 |
| 1931 | AFP | ENSG00000081051 | AENAVECF | 1577 | HLA-C*16:04 |
| 1932 | AFP | ENSG00000081051 | AENDEKPEGL | 1578 | HLA-A*30:01 |
| 1933 | AFP | ENSG00000081051 | AENDEKPEGL | 1578 | HLA-B*27:02 |
| 1934 | AFP | ENSG00000081051 | AENDEKPEGL | 1578 | HLA-B*40:01 |
| 1935 | AFP | ENSG00000081051 | AENDEKPEGL | 1578 | HLA-B*44:02 |
| 1936 | AFP | ENSG00000081051 | AENDEKPEGL | 1578 | HLA-B*44:03 |
| 1937 | AFP | ENSG00000081051 | AENDEKPEGL | 1578 | HLA-C*16:04 |
| 1938 | AFP | ENSG00000081051 | AFSDDKFIF | 1579 | HLA-A*23:01 |
| 1939 | AFP | ENSG00000081051 | AFSDDKFIF | 1579 | HLA-A*29:02 |
| 1940 | AFP | ENSG00000081051 | ALQTMKQEF | 1580 | HLA-A*32:01 |
| 1941 | AFP | ENSG00000081051 | ALQTMKQEF | 1580 | HLA-B*15:01 |
| 1942 | AFP | ENSG00000081051 | ALQTMKQEF | 1580 | HLA-B*37:01 |
| 1943 | AFP | ENSG00000081051 | ALQTMKQEF | 1580 | HLA-C*14:02 |
| 1944 | AFP | ENSG00000081051 | ALQTMKQEF | 1580 | HLA-C*16:01 |
| 1945 | AFP | ENSG00000081051 | APQLTSSELMA | 1581 | HLA-B*56:01 |
| 1946 | AFP | ENSG00000081051 | APQLTSSELM | 1582 | HLA-B*07:02 |
| 1947 | AFP | ENSG00000081051 | APQLTSSEL | 1583 | HLA-B*07:02 |
| 1948 | AFP | ENSG00000081051 | APQLTSSEL | 1583 | HLA-B*35:01 |
| 1949 | AFP | ENSG00000081051 | APQLTSSEL | 1583 | HLA-B*35:03 |
| 1950 | AFP | ENSG00000081051 | APQLTSSEL | 1583 | HLA-B*55:01 |
| 1951 | AFP | ENSG00000081051 | APQLTSSEL | 1583 | HLA-B*56:01 |
| 1952 | AFP | ENSG00000081051 | APQLTSSEL | 1583 | HLA-C*01:02 |
| 1953 | AFP | ENSG00000081051 | APQLTSSEL | 1583 | HLA-C*07:02 |
| 1954 | AFP | ENSG00000081051 | APQLTSSEL | 1583 | HLA-C*14:02 |
| 1955 | AFP | ENSG00000081051 | APTILLWAA | 1584 | HLA-B*54:01 |
| 1956 | AFP | ENSG00000081051 | APTILLWAA | 1584 | HLA-B*55:01 |
| 1957 | AFP | ENSG00000081051 | APTILLWAA | 1584 | HLA-B*56:01 |
| 1958 | AFP | ENSG00000081051 | AQFVQEATYK | 1585 | HLA-A*03:01 |
| 1959 | AFP | ENSG00000081051 | AQFVQEATYK | 1585 | HLA-A*03:02 |
| 1960 | AFP | ENSG00000081051 | AQFVQEATYK | 1585 | HLA-A*11:01 |
| 1961 | AFP | ENSG00000081051 | AQFVQEATYK | 1585 | HLA-B*I3:02 |
| 1962 | AFP | ENSG00000081051 | AQFVQEATYK | 1585 | HLA-B*27:02 |
| 1963 | AFP | ENSG00000081051 | AQFVQEATYK | 1585 | HLA-B*27:05 |
| 1964 | AFP | ENSG00000081051 | AQFVQEATY | 1586 | HLA-A*25:01 |
| 1965 | AFP | ENSG00000081051 | AQFVQEATY | 1586 | HLA-A*26:01 |
| 1966 | AFP | ENSG00000081051 | AQFVQEATY | 1586 | HLA-A*29:02 |
| 1967 | AFP | ENSG00000081051 | AQFVQEATY | 1586 | HLA-A*30:02 |
| 1968 | AFP | ENSG00000081051 | AQFVQEATY | 1586 | HLA-A*32:01 |
| 1969 | AFP | ENSG00000081051 | AQFVQEATY | 1586 | HLA-B*13:02 |
| 1970 | AFP | ENSG00000081051 | AQFVQEATY | 1586 | HLA-B*15:01 |
| 1971 | AFP | ENSG00000081051 | AQFVQEATY | 1586 | HLA-B*15:03 |
| 1972 | AFP | ENSG00000081051 | AQFVQEATY | 1586 | HLA-B*18:01 |
| 1973 | AFP | ENSG00000081051 | AQFVQEATY | 1586 | HLA-B*27:02 |
| 1974 | AFP | ENSG00000081051 | AQFVQEATY | 1586 | HLA-B*27:05 |
| 1975 | AFP | ENSG00000081051 | AQFVQEATY | 1586 | HLA-B*35:01 |
| 1976 | AFP | ENSG00000081051 | AQFVQEATY | 1586 | HLA-B*37:01 |
| 1977 | AFP | ENSG00000081051 | AQFVQEATY | 1586 | HLA-B*39:01 |
| 1978 | AFP | ENSG00000081051 | AQFVQEATY | 1586 | HLA-B*44:02 |
| 1979 | AFP | ENSG00000081051 | AQFVQEATY | 1586 | HLA-B*44:03 |
| 1980 | AFP | ENSG00000081051 | AQFVQEATY | 1586 | HLA-B*46:01 |
| 1981 | AFP | ENSG00000081051 | AQFVQEATY | 1586 | HLA-B*58:01 |
| 1982 | AFP | ENSG00000081051 | AQFVQEATY | 1586 | HLA-C*02:02 |
| 1983 | AFP | ENSG00000081051 | AQFVQEATY | 1586 | HLA-C*07:04 |
| 1984 | AFP | ENSG00000081051 | AQFVQEATY | 1586 | HLA-C*12:03 |
| 1985 | AFP | ENSG00000081051 | AQFVQEATY | 1586 | HLA-C*14:02 |
| 1986 | AFP | ENSG00000081051 | AQFVQEATY | 1586 | HLA-C*16:01 |
| 1987 | AFP | ENSG00000081051 | AQFVQEATY | 1586 | HLA-C*16:02 |
| 1988 | AFP | ENSG00000081051 | AQFVQEATY | 1586 | HLA-C*16:04 |
| 1989 | AFP | ENSG00000081051 | AQFVQEAT | 1587 | HLA-B*13:02 |
| 1990 | AFP | ENSG00000081051 | AQFVQEAT | 1587 | HLA-B*15:01 |
| 1991 | AFP | ENSG00000081051 | AQGVALQTM | 1588 | HLA-B*13:02 |
| 1992 | AFP | ENSG00000081051 | AQGVALQTM | 1588 | HLA-B*15:01 |
| 1993 | AFP | ENSG00000081051 | AQGVALQTM | 1588 | HLA-B*15:03 |
| 1994 | AFP | ENSG00000081051 | AQGVALQTM | 1588 | HLA-B*27:05 |
| 1995 | AFP | ENSG00000081051 | AQGVALQTM | 1588 | HLA-B*37:01 |
| 1996 | AFP | ENSG00000081051 | AQGVALQTM | 1588 | HLA-C*01:02 |
| 1997 | AFP | ENSG00000081051 | AQGVALQTM | 1588 | HLA-C*07:04 |
| 1998 | AFP | ENSG00000081051 | AQGVALQTM | 1588 | HLA-C*14:02 |
| 1999 | AFP | ENSG00000081051 | AQGVALQT | 1589 | HLA-B*13:02 |
| 2000 | AFP | ENSG00000081051 | ASFVHEYSR | 1590 | HLA-A*11:01 |
| 2001 | AFP | ENSG00000081051 | ASFVHEYSR | 1590 | HLA-A*31:01 |
| 2002 | AFP | ENSG00000081051 | ASFVHEYSR | 1590 | HLA-B*57:01 |
| 2003 | AFP | ENSG00000081051 | ASFVHEYSR | 1590 | HLA-C*07:06 |
| 2004 | AFP | ENSG00000081051 | ATIFFAQFV | 1591 | HLA-A*68:02 |
| 2005 | AFP | ENSG00000081051 | ATYKEVSKMVK | 1592 | HLA-A*03:01 |
| 2006 | AFP | ENSG00000081051 | ATYKEVSKMVK | 1592 | HLA-A*03:02 |
| 2007 | AFP | ENSG00000081051 | ATYKEVSKMVK | 1592 | HLA-A*11:01 |
| 2008 | AFP | ENSG00000081051 | ATYKEVSKMVK | 1592 | HLA-A*31:01 |
| 2009 | AFP | ENSG00000081051 | ATYKEVSKM | 1593 | HLA-A*03:01 |
| 2010 | AFP | ENSG00000081051 | ATYKEVSKM | 1593 | HLA-A*03:02 |
| 2011 | AFP | ENSG00000081051 | ATYKEVSKM | 1593 | HLA-A*11:01 |
| 2012 | AFP | ENSG00000081051 | ATYKEVSKM | 1593 | HLA-A*25:01 |
| 2013 | AFP | ENSG00000081051 | ATYKEVSKM | 1593 | HLA-A*26:01 |
| 2014 | AFP | ENSG00000081051 | ATYKEVSKM | 1593 | HLA-A*31:01 |
| 2015 | AFP | ENSG00000081051 | ATYKEVSKM | 1593 | HLA-A*32:01 |
| 2016 | AFP | ENSG00000081051 | ATYKEVSKM | 1593 | HLA-B*15:01 |
| 2017 | AFP | ENSG00000081051 | ATYKEVSKM | 1593 | HLA-B*40:02 |
| 2018 | AFP | ENSG00000081051 | ATYKEVSKM | 1593 | HLA-B*58:01 |
| 2019 | AFP | ENSG00000081051 | ATYKEVSKM | 1593 | HLA-C*02:02 |
| 2020 | AFP | ENSG00000081051 | ATYKEVSKM | 1593 | HLA-C*12:03 |
| 2021 | AFP | ENSG00000081051 | ATYKEVSKM | 1593 | HLA-C*16:02 |
| 2022 | AFP | ENSG00000081051 | ATYKEVSK | 1594 | HLA-A*11:01 |
| 2023 | AFP | ENSG00000081051 | AVIADFSGL | 1595 | HLA-A*02:07 |
| 2024 | AFP | ENSG00000081051 | AVIADFSGL | 1595 | HLA-A*25:01 |
| 2025 | AFP | ENSG00000081051 | AVIADFSGL | 1595 | HLA-A*26:01 |
| 2026 | AFP | ENSG00000081051 | AVIADFSGL | 1595 | HLA-B*15:01 |
| 2027 | AFP | ENSG00000081051 | AVIADFSGL | 1595 | HLA-B*40:01 |
| 2028 | AFP | ENSG00000081051 | AVIADFSGL | 1595 | HLA-B*46:01 |
| 2029 | AFP | ENSG00000081051 | AVIADFSGL | 1595 | HLA-B*58:01 |
| 2030 | AFP | ENSG00000081051 | AVIADFSGL | 1595 | HLA-C*01:02 |
| 2031 | AFP | ENSG00000081051 | AVIADFSGL | 1595 | HLA-C*03:03 |
| 2032 | AFP | ENSG00000081051 | AVIADFSGL | 1595 | HLA-C*03:04 |
| 2033 | AFP | ENSG00000081051 | AVIADFSGL | 1595 | HLA-C*16:04 |
| 2034 | AFP | ENSG00000081051 | AVMKNFGTR | 1596 | HLA-A*03:01 |
| 2035 | AFP | ENSG00000081051 | AVMKNFGTR | 1596 | HLA-A*03:02 |
| 2036 | AFP | ENSG00000081051 | AVMKNFGTR | 1596 | HLA-A*11:01 |
| 2037 | AFP | ENSG00000081051 | AVMKNFGTR | 1596 | HLA-A*31:01 |
| 2038 | AFP | ENSG00000081051 | AVMKNFGTR | 1596 | HLA-A*33:03 |
| 2039 | AFP | ENSG00000081051 | AVMKNFGTR | 1596 | HLA-A*68:01 |
| 2040 | AFP | ENSG00000081051 | AVMKNFGTR | 1596 | HLA-C*07:06 |
| 2041 | AFP | ENSG00000081051 | AVSVILRVAK | 1597 | HLA-A*03:01 |
| 2042 | AFP | ENSG00000081051 | AVSVILRVAK | 1597 | HLA-A*03:02 |
| 2043 | AFP | ENSG00000081051 | AVSVILRVAK | 1597 | HLA-A*11:01 |
| 2044 | AFP | ENSG00000081051 | AVSVILRVA | 1598 | HLA-A*32:01 |
| 2045 | AFP | ENSG00000081051 | AVSVILRVA | 1598 | HLA-B*56:01 |
| 2046 | AFP | ENSG00000081051 | AVSVILRV | 1599 | HLA-A*02:03 |
| 2047 | AFP | ENSG00000081051 | AVSVILRV | 1599 | HLA-B*13:02 |
| 2048 | AFP | ENSG00000081051 | AVSVILRV | 1599 | HLA-B*37:01 |
| 2049 | AFP | ENSG00000081051 | AYEEDRETFM | 1600 | HLA-C*04:01 |
| 2050 | AFP | ENSG00000081051 | AYEEDRETF | 1601 | HLA-A*23:01 |
| 2051 | AFP | ENSG00000081051 | AYEEDRETF | 1601 | HLA-A*24:02 |
| 2052 | AFP | ENSG00000081051 | AYEEDRETF | 1601 | HLA-B*38:01 |
| 2053 | AFP | ENSG00000081051 | AYEEDRETF | 1601 | HLA-B*55:01 |
| 2054 | AFP | ENSG00000081051 | AYEEDRETF | 1601 | HLA-C*04:01 |
| 2055 | AFP | ENSG00000081051 | AYEEDRETF | 1601 | HLA-C*14:02 |
| 2056 | AFP | ENSG00000081051 | AYTKKAPQL | 1602 | HLA-A*23:01 |
| 2057 | AFP | ENSG00000081051 | AYTKKAPQL | 1602 | HLA-A*24:02 |
| 2058 | AFP | ENSG00000081051 | AYTKKAPQL | 1602 | HLA-C*14:02 |
| 2059 | AFP | ENSG00000081051 | AYTKKAPQL | 1602 | HLA-C*16:01 |
| 2060 | AFP | ENSG00000081051 | CFQTKAATV | 1603 | HLA-C*14:02 |
| 2061 | AFP | ENSG00000081051 | CLQDGEKIMSY | 1604 | HLA-A*01:01 |
| 2062 | AFP | ENSG00000081051 | CLQDGEKIMSY | 1604 | HLA-A*03:01 |
| 2063 | AFP | ENSG00000081051 | CLQDGEKIMSY | 1604 | HLA-A*03:02 |
| 2064 | AFP | ENSG00000081051 | CLQDGEKIMSY | 1604 | HLA-A*25:01 |
| 2065 | AFP | ENSG00000081051 | CLQDGEKIMSY | 1604 | HLA-A*26:01 |
| 2066 | AFP | ENSG00000081051 | CLQDGEKIMSY | 1604 | HLA-A*30:02 |
| 2067 | AFP | ENSG00000081051 | CLQDGEKIMSY | 1604 | HLA-A*32:01 |
| 2068 | AFP | ENSG00000081051 | CLQDGEKIMSY | 1604 | HLA-B*15:01 |
| 2069 | AFP | ENSG00000081051 | CQAQGVALQTM | 1605 | HLA-C*07:04 |
| 2070 | AFP | ENSG00000081051 | CQAQGVAL | 1606 | HLA-B*15:01 |
| 2071 | AFP | ENSG00000081051 | CQAQGVAL | 1606 | HLA-B*27:05 |
| 2072 | AFP | ENSG00000081051 | CQAQGVAL | 1606 | HLA-B*39:01 |
| 2073 | AFP | ENSG00000081051 | CQAQGVAL | 1606 | HLA-C*03:04 |
| 2074 | AFP | ENSG00000081051 | CQDKGEEEL | 1607 | HLA-B*38:01 |
| 2075 | AFP | ENSG00000081051 | CQDKGEEEL | 1607 | HLA-B*39:01 |
| 2076 | AFP | ENSG00000081051 | CSQQDTLSNK | 1608 | HLA-A*03:02 |
| 2077 | AFP | ENSG00000081051 | CSQQDTLSNK | 1608 | HLA-A*11:01 |
| 2078 | AFP | ENSG00000081051 | CSQQDTLSNK | 1608 | HLA-B*27:02 |
| 2079 | AFP | ENSG00000081051 | DALTAMKP | 1609 | HLA-A*33:01 |
| 2080 | AFP | ENSG00000081051 | DALTMEK | 1610 | HLA-A*33:01 |
| 2081 | AFP | ENSG00000081051 | DALTALEK | 1610 | HLA-B*51:01 |
| 2082 | AFP | ENSG00000081051 | DEKPEGLSP | 1611 | HLA-B*18:01 |
| 2083 | AFP | ENSG00000081051 | DEKPEGLSP | 1611 | HLA-B*40:02 |
| 2084 | AFP | ENSG00000081051 | DETYVPPAF | 1612 | HLA-A*23:01 |
| 2085 | AFP | ENSG00000081051 | DETYVPPAF | 1612 | HLA-A*25:01 |
| 2086 | AFP | ENSG00000081051 | DETYVPPAF | 1612 | HLA-A*30:01 |
| 2087 | AFP | ENSG00000081051 | DETYVPPAF | 1612 | HLA-B*18:01 |
| 2088 | AFP | ENSG00000081051 | DETYVPPAF | 1612 | HLA-B*27:02 |
| 2089 | AFP | ENSG00000081051 | DETYVPPAF | 1612 | HLA-B*35:01 |
| 2090 | AFP | ENSG00000081051 | DETYVPPAF | 1612 | HLA-B*40:01 |
| 2091 | AFP | ENSG00000081051 | DETYVPPAF | 1612 | HLA-B*44:02 |
| 2092 | AFP | ENSG00000081051 | DETYVPPAF | 1612 | HLA-B*44:03 |
| 2093 | AFP | ENSG00000081051 | DETYVPPAF | 1612 | HLA-C*16:04 |
| 2094 | AFP | ENSG00000081051 | DETYVPPA | 1613 | HLA-B*18:01 |
| 2095 | AFP | ENSG00000081051 | DFNQFSSGEK | 1614 | HLA-A*33:01 |
| 2096 | AFP | ENSG00000081051 | DGEKIMSYI | 1615 | HLA-B*51:01 |
| 2097 | AFP | ENSG00000081051 | DGEKIMSY | 1616 | HLA-B*18:01 |
| 2098 | AFP | ENSG00000081051 | DGEKIMSY | 1616 | HLA-C*07:01 |
| 2099 | AFP | ENSG00000081051 | DLATIFFAQFV | 1617 | HLA-A*68:02 |
| 2100 | AFP | ENSG00000081051 | DLATIFFAQF | 1618 | HLA-A*25:01 |
| 2101 | AFP | ENSG00000081051 | DLATIFFAQF | 1618 | HLA-A*26:01 |
| 2102 | AFP | ENSG00000081051 | DSYQCTAEI | 1619 | HLA-B*51:01 |
| 2103 | AFP | ENSG00000081051 | DTLSNKITE | 1620 | HLA-A*33:01 |
| 2104 | AFP | ENSG00000081051 | EATYKEVSK | 1621 | HLA-A*33:01 |
| 2105 | AFP | ENSG00000081051 | EATYKEVSK | 1621 | HLA-A*33:03 |
| 2106 | AFP | ENSG00000081051 | EATYKEVSK | 1621 | HLA-A*68:01 |
| 2107 | AFP | ENSG00000081051 | EATYKEVSK | 1621 | HLA-C*07:06 |
| 2108 | AFP | ENSG00000081051 | EAVIADFSGL | 1622 | HLA-A*25:01 |
| 2109 | AFP | ENSG00000081051 | EAVIADFSGL | 1622 | HLA-A*26:01 |
| 2110 | AFP | ENSG00000081051 | EAYEEDRETFM | 1623 | HLA-A*26:01 |
| 2111 | AFP | ENSG00000081051 | EAYEEDRETF | 1624 | HLA-A*25:01 |
| 2112 | AFP | ENSG00000081051 | EAYEEDRETF | 1624 | HLA-A*26:01 |
| 2113 | AFP | ENSG00000081051 | EAYEEDRETF | 1624 | HLA-A*33:03 |
| 2114 | AFP | ENSG00000081051 | EAYEEDRETF | 1624 | HLA-B*15:01 |
| 2115 | AFP | ENSG00000081051 | EAYEEDRETF | 1624 | HLA-B*15:03 |
| 2116 | AFP | ENSG00000081051 | EAYEEDRETF | 1624 | HLA-B*27:02 |
| 2117 | AFP | ENSG00000081051 | EAYEEDRETF | 1624 | HLA-B*35:01 |
| 2118 | AFP | ENSG00000081051 | EAYEEDRETF | 1624 | HLA-B*35:03 |
| 2119 | AFP | ENSG00000081051 | EAYEEDRETF | 1624 | HLA-B*38:01 |
| 2120 | AFP | ENSG00000081051 | EAYEEDRETF | 1624 | HLA-B*46:01 |
| 2121 | AFP | ENSG00000081051 | EAYEEDRETF | 1624 | HLA-B*51:01 |
| 2122 | AFP | ENSG00000081051 | EAYEEDRETF | 1624 | HLA-B*55:01 |
| 2123 | AFP | ENSG00000081051 | EAYEEDRETF | 1624 | HLA-B*57:01 |
| 2124 | AFP | ENSG00000081051 | EAYEEDRETF | 1624 | HLA-B*58:01 |
| 2125 | AFP | ENSG00000081051 | EAYEEDRETF | 1624 | HLA-C*02:02 |
| 2126 | AFP | ENSG00000081051 | EAYEEDRETF | 1624 | HLA-C*03:03 |
| 2127 | AFP | ENSG00000081051 | EAYEEDRETF | 1624 | HLA-C*05:01 |
| 2128 | AFP | ENSG00000081051 | EAYEEDRETF | 1624 | HLA-C*07:06 |
| 2129 | AFP | ENSG00000081051 | EAYEEDRETF | 1624 | HLA-C*16:04 |
| 2130 | AFP | ENSG00000081051 | EEDRETFMNKF | 1625 | HLA-B*44:02 |
| 2131 | AFP | ENSG00000081051 | EEDRETFMNKF | 1625 | HLA-B*44:03 |
| 2132 | AFP | ENSG00000081051 | EEGQKLISK | 1626 | HLA-B*44:02 |
| 2133 | AFP | ENSG00000081051 | EEGQKLISK | 1626 | HLA-B*44:03 |
| 2134 | AFP | ENSG00000081051 | EEQLEAVIADF | 1627 | HLA-B*44:02 |
| 2135 | AFP | ENSG00000081051 | EEQLEAVIADF | 1627 | HLA-B*44:03 |
| 2136 | AFP | ENSG00000081051 | EGAADIIIGHL | 1628 | HLA-A*68:02 |
| 2137 | AFP | ENSG00000081051 | EGAADIIIGH | 1629 | HLA-A*68:01 |
| 2138 | AFP | ENSG00000081051 | EGAADIIIGH | 1629 | HLA-C*07:06 |
| 2139 | AFP | ENSG00000081051 | EGLSPNLNR | 1630 | HLA-A*33:01 |
| 2140 | AFP | ENSG00000081051 | EGLSPNLNR | 1630 | HLA-A*33:03 |
| 2141 | AFP | ENSG00000081051 | EGLSPNLNR | 1630 | HLA-A*68:01 |
| 2142 | AFP | ENSG00000081051 | EGLSPNLNR | 1630 | HLA-C*07:06 |
| 2143 | AFP | ENSG00000081051 | EGQKLISKTR | 1631 | HLA-A*33:03 |
| 2144 | AFP | ENSG00000081051 | EIQKLVLDV | 1632 | HLA-A*68:02 |
| 2145 | AFP | ENSG00000081051 | ELMAITRKMAA | 1633 | HLA-B*08:01 |
| 2146 | AFP | ENSG00000081051 | ELMAITRKM | 1634 | HLA-A*25:01 |
| 2147 | AFP | ENSG00000081051 | ELMAITRKM | 1634 | HLA-A*26:01 |
| 2148 | AFP | ENSG00000081051 | ELMAITRKM | 1634 | HLA-A*33:03 |
| 2149 | AFP | ENSG00000081051 | ELMAITRKM | 1634 | HLA-B*08:01 |
| 2150 | AFP | ENSG00000081051 | ELMAITRKM | 1634 | HLA-B*44:02 |
| 2151 | AFP | ENSG00000081051 | ELMAITRKM | 1634 | HLA-B*44:03 |
| 2152 | AFP | ENSG00000081051 | ELRESSLLNQH | 1635 | HLA-A*33:01 |
| 2153 | AFP | ENSG00000081051 | EMTPVNPGV | 1636 | HLA-A*02:01 |
| 2154 | AFP | ENSG00000081051 | EMTPVNPGV | 1636 | HLA-A*02:03 |
| 2155 | AFP | ENSG00000081051 | EMTPVNPGV | 1636 | HLA-A*02:07 |
| 2156 | AFP | ENSG00000081051 | EMTPVNPGV | 1636 | HLA-A*26:01 |
| 2157 | AFP | ENSG00000081051 | EMTPVNPGV | 1636 | HLA-A*30:01 |
| 2158 | AFP | ENSG00000081051 | EMTPVNPGV | 1636 | HLA-A*68:02 |
| 2159 | AFP | ENSG00000081051 | EMTPVNPGV | 1636 | HLA-B*13:02 |
| 2160 | AFP | ENSG00000081051 | EMTPVNPGV | 1636 | HLA-B*27:05 |
| 2161 | AFP | ENSG00000081051 | EMTPVNPGV | 1636 | HLA-B*55:01 |
| 2162 | AFP | ENSG00000081051 | EMTPVNPGV | 1636 | HLA-C*04:01 |
| 2163 | AFP | ENSG00000081051 | EMTPVNPGV | 1636 | HLA-C*06:02 |
| 2164 | AFP | ENSG00000081051 | EMTPVNPGV | 1636 | HLA-C*16:02 |
| 2165 | AFP | ENSG00000081051 | ENDEKPEGL | 1637 | HLA-C*05:01 |
| 2166 | AFP | ENSG00000081051 | EPVTSCEAY | 1638 | HLA-A*26:01 |
| 2167 | AFP | ENSG00000081051 | EPVTSCEAY | 1638 | HLA-B*35:01 |
| 2168 | AFP | ENSG00000081051 | EPVTSCEAY | 1638 | HLA-B*55:01 |
| 2169 | AFP | ENSG00000081051 | EQLEAVIADF | 1639 | HLA-A*25:01 |
| 2170 | AFP | ENSG00000081051 | EQLEAVIADF | 1639 | HLA-A*26:01 |
| 2171 | AFP | ENSG00000081051 | ESIFLIFLL | 1640 | HLA-A*68:02 |
| 2172 | AFP | ENSG00000081051 | ESQALAKR | 1641 | HLA-A*33:01 |
| 2173 | AFP | ENSG00000081051 | ESQALAKR | 1641 | HLA-A*33:03 |
| 2174 | AFP | ENSG00000081051 | ETFMNKFIY | 1642 | HLA-A*01:01 |
| 2175 | AFP | ENSG00000081051 | ETFMNKFIY | 1642 | HLA-A*26:01 |
| 2176 | AFP | ENSG00000081051 | ETYVPPAF | 1643 | HLA-A*25:01 |
| 2177 | AFP | ENSG00000081051 | ETYVPPAF | 1643 | HLA-A*26:01 |
| 2178 | AFP | ENSG00000081051 | ETYVPPAF | 1643 | HLA-B*18:01 |
| 2179 | AFP | ENSG00000081051 | ETYVPPAF | 1643 | HLA-B*57:01 |
| 2180 | AFP | ENSG00000081051 | ETYVPPAF | 1643 | HLA-C*05:01 |
| 2181 | AFP | ENSG00000081051 | EVSKMVKDAL | 1644 | HLA-A*68:01 |
| 2182 | AFP | ENSG00000081051 | EVSKMVKDAL | 1644 | HLA-A*68:02 |
| 2183 | AFP | ENSG00000081051 | EVSKMVKDAL | 1644 | HLA-B*07:02 |
| 2184 | AFP | ENSG00000081051 | EVSKMVKDAL | 1644 | HLA-C*07:01 |
| 2185 | AFP | ENSG00000081051 | EYGIASILDSY | 1645 | HLA-A*29:02 |
| 2186 | AFP | ENSG00000081051 | EYGIASILDSY | 1645 | HLA-A*30:02 |
| 2187 | AFP | ENSG00000081051 | EYGIASIL | 1646 | HLA-C*14:02 |
| 2188 | AFP | ENSG00000081051 | EYSRRHPQL | 1647 | HLA-A*24:02 |
| 2189 | AFP | ENSG00000081051 | EYYLQNAFL | 1648 | HLA-A*23:01 |
| 2190 | AFP | ENSG00000081051 | EYYLQNAFL | 1648 | HLA-A*24:02 |
| 2191 | AFP | ENSG00000081051 | EYYLQNAF | 1649 | HLA-C*14:02 |
| 2192 | AFP | ENSG00000081051 | FAEEGQKLISK | 1650 | HLA-A*01:01 |
| 2193 | AFP | ENSG00000081051 | FAEEGQKLISK | 1650 | HLA-B*27:02 |
| 2194 | AFP | ENSG00000081051 | FAEEGQKLI | 1651 | HLA-B*38:01 |
| 2195 | AFP | ENSG00000081051 | FAEEGQKLI | 1651 | HLA-B*49:01 |
| 2196 | AFP | ENSG00000081051 | FAEEGQKLI | 1651 | HLA-B*51:01 |
| 2197 | AFP | ENSG00000081051 | FAEEGQKLI | 1651 | HLA-C*03:03 |
| 2198 | AFP | ENSG00000081051 | FAEEGQKLI | 1651 | HLA-C*03:04 |
| 2199 | AFP | ENSG00000081051 | FAEEGQKLI | 1651 | HLA-C*05:01 |
| 2200 | AFP | ENSG00000081051 | FAEEGQKLI | 1651 | HLA-C*16:02 |
| 2201 | AFP | ENSG00000081051 | FAEEGQKL | 1652 | HLA-B*35:03 |
| 2202 | AFP | ENSG00000081051 | FAEEGQKL | 1652 | HLA-B*39:01 |
| 2203 | AFP | ENSG00000081051 | FAEEGQKL | 1652 | HLA-C*01:02 |
| 2204 | AFP | ENSG00000081051 | FAEEGQKL | 1652 | HLA-C*03:03 |
| 2205 | AFP | ENSG00000081051 | FAEEGQKL | 1652 | HLA-C*03:04 |
| 2206 | AFP | ENSG00000081051 | FAEEGQKL | 1652 | HLA-C*05:01 |
| 2207 | AFP | ENSG00000081051 | FAQFVQEATYK | 1653 | HLA-B*27:02 |
| 2208 | AFP | ENSG00000081051 | FAQFVQEATY | 1654 | HLA-A*01:01 |
| 2209 | AFP | ENSG00000081051 | FAQFVQEATY | 1654 | HLA-A*29:02 |
| 2210 | AFP | ENSG00000081051 | FAQFVQEATY | 1654 | HLA-A*30:02 |
| 2211 | AFP | ENSG00000081051 | FAQFVQEATY | 1654 | HLA-B*27:05 |
| 2212 | AFP | ENSG00000081051 | FAQFVQEATY | 1654 | HLA-B*35:01 |
| 2213 | AFP | ENSG00000081051 | FAQFVQEATY | 1654 | HLA-B*39:01 |
| 2214 | AFP | ENSG00000081051 | FAQFVQEATY | 1654 | HLA-B*46:01 |
| 2215 | AFP | ENSG00000081051 | FAQFVQEATY | 1654 | HLA-B*55:01 |
| 2216 | AFP | ENSG00000081051 | FAQFVQEATY | 1654 | HLA-C*02:02 |
| 2217 | AFP | ENSG00000081051 | FAQFVQEATY | 1654 | HLA-C*03:03 |
| 2218 | AFP | ENSG00000081051 | FAQFVQEATY | 1654 | HLA-C*04:01 |
| 2219 | AFP | ENSG00000081051 | FAQFVQEATY | 1654 | HLA-C*07:01 |
| 2220 | AFP | ENSG00000081051 | FAQFVQEATY | 1654 | HLA-C*12:03 |
| 2221 | AFP | ENSG00000081051 | FAQFVQEATY | 1654 | HLA-C*14:02 |
| 2222 | AFP | ENSG00000081051 | FAQFVQEATY | 1654 | HLA-C*16:02 |
| 2223 | AFP | ENSG00000081051 | FAQFVQEATY | 1654 | HLA-C*16:04 |
| 2224 | AFP | ENSG00000081051 | FAQFVQEA | 1655 | HLA-B*54:01 |
| 2225 | AFP | ENSG00000081051 | FFAQFVQEATY | 1656 | HLA-A*29:02 |
| 2226 | AFP | ENSG00000081051 | FFAQFVQEA | 1657 | HLA-C*14:02 |
| 2227 | AFP | ENSG00000081051 | FIFHKDLCQA | 1658 | HLA-A*02:03 |
| 2228 | AFP | ENSG00000081051 | FLAHKKPTPA | 1659 | HLA-A*02:03 |
| 2229 | AFP | ENSG00000081051 | FLASFVHEY | 1660 | HLA-A*01:01 |
| 2230 | AFP | ENSG00000081051 | FLASFVHEY | 1660 | HLA-A*02:01 |
| 2231 | AFP | ENSG00000081051 | FLASFVHEY | 1660 | HLA-A*02:03 |
| 2232 | AFP | ENSG00000081051 | FLASFVHEY | 1660 | HLA-A*02:04 |
| 2233 | AFP | ENSG00000081051 | FLASFVHEY | 1660 | HLA-A*02:07 |
| 2234 | AFP | ENSG00000081051 | FLASFVHEY | 1660 | HLA-A*03:01 |
| 2235 | AFP | ENSG00000081051 | FLASFVHEY | 1660 | HLA-A*25:01 |
| 2236 | AFP | ENSG00000081051 | FLASFVHEY | 1660 | HLA-A*26:01 |
| 2237 | AFP | ENSG00000081051 | FLASFVHEY | 1660 | HLA-A*29:02 |
| 2238 | AFP | ENSG00000081051 | FLASFVHEY | 1660 | HLA-A*30:02 |
| 2239 | AFP | ENSG00000081051 | FLASFVHEY | 1660 | HLA-A*32:01 |
| 2240 | AFP | ENSG00000081051 | FLASFVHEY | 1660 | HLA-A*33:01 |
| 2241 | AFP | ENSG00000081051 | FLASFVHEY | 1660 | HLA-A*68:02 |
| 2242 | AFP | ENSG00000081051 | FLASFVHEY | 1660 | HLA-B*15:01 |
| 2243 | AFP | ENSG00000081051 | FLASFVHEY | 1660 | HLA-B*15:03 |
| 2244 | AFP | ENSG00000081051 | FLASFVHEY | 1660 | HLA-B*18:01 |
| 2245 | AFP | ENSG00000081051 | FLASFVHEY | 1660 | HLA-B*35:01 |
| 2246 | AFP | ENSG00000081051 | FLASFVHEY | 1660 | HLA-B*44:02 |
| 2247 | AFP | ENSG00000081051 | FLASFVHEY | 1660 | HLA-B*44:03 |
| 2248 | AFP | ENSG00000081051 | FLASFVHEY | 1660 | HLA-B*46:01 |
| 2249 | AFP | ENSG00000081051 | FLASFVHEY | 1660 | HLA-B*57:01 |
| 2250 | AFP | ENSG00000081051 | FLASFVHEY | 1660 | HLA-C*02:02 |
| 2251 | AFP | ENSG00000081051 | FLASFVHEY | 1660 | HLA-C*07:04 |
| 2252 | AFP | ENSG00000081051 | FLASFVHEY | 1660 | HLA-C*12:03 |
| 2253 | AFP | ENSG00000081051 | FLASFVHEY | 1660 | HLA-C*16:01 |
| 2254 | AFP | ENSG00000081051 | FLASFVHEY | 1660 | HLA-C*16:02 |
| 2255 | AFP | ENSG00000081051 | FLASFVHEY | 1660 | HLA-C*16:04 |
| 2256 | AFP | ENSG00000081051 | FLGDRDFNQF | 1661 | HLA-A*24:02 |
| 2257 | AFP | ENSG00000081051 | FLLNFTESRTL | 1662 | HLA-A*02:01 |
| 2258 | AFP | ENSG00000081051 | FLLNFTESRTL | 1662 | HLA-A*02:03 |
| 2259 | AFP | ENSG00000081051 | FLLNFTESRTL | 1662 | HLA-A*02:04 |
| 2260 | AFP | ENSG00000081051 | FLLNFTESR | 1663 | HLA-A*33:01 |
| 2261 | AFP | ENSG00000081051 | FLLNFTESR | 1663 | HLA-A*33:03 |
| 2262 | AFP | ENSG00000081051 | FLVAYTKKA | 1664 | HLA-A*02:03 |
| 2263 | AFP | ENSG00000081051 | FLYAPTILLW | 1665 | HLA-A*29:02 |
| 2264 | AFP | ENSG00000081051 | FLYAPTILL | 1666 | HLA-A*02:01 |
| 2265 | AFP | ENSG00000081051 | FLYAPTILL | 1666 | HLA-A*02:03 |
| 2266 | AFP | ENSG00000081051 | FLYAPTILL | 1666 | HLA-A*02:04 |
| 2267 | AFP | ENSG00000081051 | FLYAPTILL | 1666 | HLA-A*02:07 |
| 2268 | AFP | ENSG00000081051 | FMNKFIYEI | 1667 | HLA-A*02:01 |
| 2269 | AFP | ENSG00000081051 | FMNKFIYEI | 1667 | HLA-A*02:03 |
| 2270 | AFP | ENSG00000081051 | FMNKFIYEI | 1667 | HLA-A*02:04 |
| 2271 | AFP | ENSG00000081051 | FMNKFIYEI | 1667 | HLA-A*02:07 |
| 2272 | AFP | ENSG00000081051 | FQAITVTKL | 1668 | HLA-A*02:01 |
| 2273 | AFP | ENSG00000081051 | FQAITVTKL | 1668 | HLA-A*02:03 |
| 2274 | AFP | ENSG00000081051 | FQAITVTKL | 1668 | HLA-A*02:04 |
| 2275 | AFP | ENSG00000081051 | FQAITVTKL | 1668 | HLA-A*24:02 |
| 2276 | AFP | ENSG00000081051 | FQAITVTKL | 1668 | HLA-A*30:01 |
| 2277 | AFP | ENSG00000081051 | FQAITVTKL | 1668 | HLA-A*32:01 |
| 2278 | AFP | ENSG00000081051 | FQAITVTKL | 1668 | HLA-A*68:02 |
| 2279 | AFP | ENSG00000081051 | FQAITVTKL | 1668 | HLA-B*13:02 |
| 2280 | AFP | ENSG00000081051 | FQAITVTKL | 1668 | HLA-B*15:01 |
| 2281 | AFP | ENSG00000081051 | FQAITVTKL | 1668 | HLA-B*I5:03 |
| 2282 | AFP | ENSG00000081051 | FQAITVTKL | 1668 | HLA-B*27:05 |
| 2283 | AFP | ENSG00000081051 | FQAITVTKL | 1668 | HLA-B*38:01 |
| 2284 | AFP | ENSG00000081051 | FQAITVTKL | 1668 | HLA-B*39:01 |
| 2285 | AFP | ENSG00000081051 | FQAITVTKL | 1668 | HLA-B*40:01 |
| 2286 | AFP | ENSG00000081051 | FQAITVTKL | 1668 | HLA-B*40:02 |
| 2287 | AFP | ENSG00000081051 | FQAITVTKL | 1668 | HLA-B*58:01 |
| 2288 | AFP | ENSG00000081051 | FQAITVTKL | 1668 | HLA-C*02:02 |
| 2289 | AFP | ENSG00000081051 | FQAITVTKL | 1668 | HLA-C*06:02 |
| 2290 | AFP | ENSG00000081051 | FQAITVTKL | 1668 | HLA-C*07:04 |
| 2291 | AFP | ENSG00000081051 | FQAITVTKL | 1668 | HLA-C*12:03 |
| 2292 | AFP | ENSG00000081051 | FQKLGEYY | 1669 | HLA-A*30:02 |
| 2293 | AFP | ENSG00000081051 | FQKLGEYY | 1669 | HLA-B*15:01 |
| 2294 | AFP | ENSG00000081051 | FQKLGEYY | 1669 | HLA-B*15:03 |
| 2295 | AFP | ENSG00000081051 | FQKLGEYY | 1669 | HLA-B*46:01 |
| 2296 | AFP | ENSG00000081051 | FQKLGEYY | 1669 | HLA-C*02:02 |
| 2297 | AFP | ENSG00000081051 | FQKLGEYY | 1669 | HLA-C*07:04 |
| 2298 | AFP | ENSG00000081051 | FQTENPLEC | 1670 | HLA-A*02:01 |
| 2299 | AFP | ENSG00000081051 | FQTENPLEC | 1670 | HLA-A*30:01 |
| 2300 | AFP | ENSG00000081051 | FQTENPLEC | 1670 | HLA-B*13:02 |
| 2301 | AFP | ENSG00000081051 | FQTENPLEC | 1670 | HLA-B*39:01 |
| 2302 | AFP | ENSG00000081051 | FQTENPLEC | 1670 | HLA-C*02:02 |
| 2303 | AFP | ENSG00000081051 | FQTENPLEC | 1670 | HLA-C*03:03 |
| 2304 | AFP | ENSG00000081051 | FQTENPLEC | 1670 | HLA-C*03:04 |
| 2305 | AFP | ENSG00000081051 | FQTENPLEC | 1670 | HLA-C*12:03 |
| 2306 | AFP | ENSG00000081051 | FQTENPLEC | 1670 | HLA-C*16:02 |
| 2307 | AFP | ENSG00000081051 | FQTKAATVTK | 1671 | HLA-B*27:05 |
| 2308 | AFP | ENSG00000081051 | FQTKAATVT | 1672 | HLA-B*13:02 |
| 2309 | AFP | ENSG00000081051 | FQTKAATV | 1673 | HLA-B*13:02 |
| 2310 | AFP | ENSG00000081051 | FQVPEPVTS | 1674 | HLA-B*27:05 |
| 2311 | AFP | ENSG00000081051 | FSDDKFIFH | 1675 | HLA-A*01:01 |
| 2312 | AFP | ENSG00000081051 | FSSGEKNIF | 1676 | HLA-C*16:01 |
| 2313 | AFP | ENSG00000081051 | FSSLVVDETY | 1677 | HLA-A*01:01 |
| 2314 | AFP | ENSG00000081051 | FTEIQKLVL | 1678 | HLA-A*01:01 |
| 2315 | AFP | ENSG00000081051 | FTEIQKLVL | 1678 | HLA-C*03:03 |
| 2316 | AFP | ENSG00000081051 | FTEIQKLVL | 1678 | HLA-C*03:04 |
| 2317 | AFP | ENSG00000081051 | FTESRTLHR | 1679 | HLA-A*01:01 |
| 2318 | AFP | ENSG00000081051 | FTKVNFTEI | 1680 | HLA-A*02:03 |
| 2319 | AFP | ENSG00000081051 | FTKVNFTEI | 1680 | HLA-A*24:02 |
| 2320 | AFP | ENSG00000081051 | FTKVNFTEI | 1680 | HLA-A*25:01 |
| 2321 | AFP | ENSG00000081051 | FTKVNFTEI | 1680 | HLA-A*68:02 |
| 2322 | AFP | ENSG00000081051 | FTKVNFTEI | 1680 | HLA-B*40:02 |
| 2323 | AFP | ENSG00000081051 | FTKVNFTEI | 1680 | HLA-B*46:01 |
| 2324 | AFP | ENSG00000081051 | FTKVNFTEI | 1680 | HLA-C*02:02 |
| 2325 | AFP | ENSG00000081051 | FTKVNFTEI | 1680 | HLA-C*03:04 |
| 2326 | AFP | ENSG00000081051 | FVQEATYKEV | 1681 | HLA-A*02:03 |
| 2327 | AFP | ENSG00000081051 | FVQEATYKEV | 1681 | HLA-A*02:07 |
| 2328 | AFP | ENSG00000081051 | FVQEATYKEV | 1681 | HLA-A*25:01 |
| 2329 | AFP | ENSG00000081051 | FVQEATYKEV | 1681 | HLA-A*26:01 |
| 2330 | AFP | ENSG00000081051 | FVQEATYKEV | 1681 | HLA-A*68:02 |
| 2331 | AFP | ENSG00000081051 | FVQEATYKEV | 1681 | HLA-C*02:02 |
| 2332 | AFP | ENSG00000081051 | FVQEATYKEV | 1681 | HLA-C*03:04 |
| 2333 | AFP | ENSG00000081051 | FVQEATYK | 1682 | HLA-A*03:02 |
| 2334 | AFP | ENSG00000081051 | FVQEATYK | 1682 | HLA-A*11:01 |
| 2335 | AFP | ENSG00000081051 | FVQEATYK | 1682 | HLA-B*27:02 |
| 2336 | AFP | ENSG00000081051 | FVQEATYK | 1682 | HLA-C*04:01 |
| 2337 | AFP | ENSG00000081051 | GAADIIIGHL | 1683 | HLA-A*02:03 |
| 2338 | AFP | ENSG00000081051 | GAADIIIGHL | 1683 | HLA-A*02:04 |
| 2339 | AFP | ENSG00000081051 | GAADIIIGHL | 1683 | HLA-A*25:01 |
| 2340 | AFP | ENSG00000081051 | GAADIIIGHL | 1683 | HLA-A*26:01 |
| 2341 | AFP | ENSG00000081051 | GAADIIIGHL | 1683 | HLA-A*30:01 |
| 2342 | AFP | ENSG00000081051 | GAADIIIGHL | 1683 | HLA-A*68:02 |
| 2343 | AFP | ENSG00000081051 | GAADIIIGH | 1684 | HLA-A*03:01 |
| 2344 | AFP | ENSG00000081051 | GAADIIIGH | 1684 | HLA-A*03:02 |
| 2345 | AFP | ENSG00000081051 | GAADIIIGH | 1684 | HLA-A*II:01 |
| 2346 | AFP | ENSG00000081051 | GAADIIIGH | 1684 | HLA-A*26:01 |
| 2347 | AFP | ENSG00000081051 | GAADIIIGH | 1684 | HLA-A*68:01 |
| 2348 | AFP | ENSG00000081051 | GAADIIIGH | 1684 | HLA-B*27:05 |
| 2349 | AFP | ENSG00000081051 | GAADIIIGH | 1684 | HLA-C*02:02 |
| 2350 | AFP | ENSG00000081051 | GAADIIIGH | 1684 | HLA-C*07:06 |
| 2351 | AFP | ENSG00000081051 | GAADIIIGH | 1684 | HLA-C*12:03 |
| 2352 | AFP | ENSG00000081051 | GAADIIIGH | 1684 | HLA-C*16:04 |
| 2353 | AFP | ENSG00000081051 | GDRDFNQF | 1685 | HLA-B*18:01 |
| 2354 | AFP | ENSG00000081051 | GDRDFNQF | 1685 | HLA-B*37:01 |
| 2355 | AFP | ENSG00000081051 | GEEELQKYI | 1686 | HLA-B*40:01 |
| 2356 | AFP | ENSG00000081051 | GEEELQKYI | 1686 | HLA-B*44:02 |
| 2357 | AFP | ENSG00000081051 | GEEELQKYI | 1686 | HLA-B*44:03 |
| 2358 | AFP | ENSG00000081051 | GEEELQKYI | 1686 | HLA-B*49:01 |
| 2359 | AFP | ENSG00000081051 | GEEELQKY | 1687 | HLA-B*18:01 |
| 2360 | AFP | ENSG00000081051 | GEEELQKY | 1687 | HLA-B*44:02 |
| 2361 | AFP | ENSG00000081051 | GEGAADIII | 1688 | HLA-B*40:01 |
| 2362 | AFP | ENSG00000081051 | GEGAADIII | 1688 | HLA-B*49:01 |
| 2363 | AFP | ENSG00000081051 | GEKIMSYI | 1689 | HLA-B*49:01 |
| 2364 | AFP | ENSG00000081051 | GEKNIFLASF | 1690 | HLA-B*44:02 |
| 2365 | AFP | ENSG00000081051 | GEYYLQNAFL | 1691 | HLA-B*40:01 |
| 2366 | AFP | ENSG00000081051 | GEYYLQNAFL | 1691 | HLA-B*49:01 |
| 2367 | AFP | ENSG00000081051 | GEYYLQNAF | 1692 | HLA-A*30:01 |
| 2368 | AFP | ENSG00000081051 | GEYYLQNAF | 1692 | HLA-B*13:02 |
| 2369 | AFP | ENSG00000081051 | GEYYLQNAF | 1692 | HLA-B*15:01 |
| 2370 | AFP | ENSG00000081051 | GEYYLQNAF | 1692 | HLA-B*15:03 |
| 2371 | AFP | ENSG00000081051 | GEYYLQNAF | 1692 | HLA-B*18:01 |
| 2372 | AFP | ENSG00000081051 | GEYYLQNAF | 1692 | HLA-B*27:02 |
| 2373 | AFP | ENSG00000081051 | GEYYLQNAF | 1692 | HLA-B*37:01 |
| 2374 | AFP | ENSG00000081051 | GEYYLQNAF | 1692 | HLA-B*40:01 |
| 2375 | AFP | ENSG00000081051 | GEYYLQNAF | 1692 | HLA-B*44:02 |
| 2376 | AFP | ENSG00000081051 | GEYYLQNAF | 1692 | HLA-B*44:03 |
| 2377 | AFP | ENSG00000081051 | GEYYLQNAF | 1692 | HLA-B*49:01 |
| 2378 | AFP | ENSG00000081051 | GEYYLQNAF | 1692 | HLA-C*16:04 |
| 2379 | AFP | ENSG00000081051 | GEYYLQNA | 1693 | HLA-B*49:01 |
| 2380 | AFP | ENSG00000081051 | GIASILDSY | 1694 | HLA-A*01:01 |
| 2381 | AFP | ENSG00000081051 | GIASILDSY | 1694 | HLA-A*25:01 |
| 2382 | AFP | ENSG00000081051 | GIASILDSY | 1694 | HLA-A*26:01 |
| 2383 | AFP | ENSG00000081051 | GIASILDSY | 1694 | HLA-A*29:02 |
| 2384 | AFP | ENSG00000081051 | GIASILDSY | 1694 | HLA-A*30:02 |
| 2385 | AFP | ENSG00000081051 | GIASILDSY | 1694 | HLA-A*32:01 |
| 2386 | AFP | ENSG00000081051 | GIASILDSY | 1694 | HLA-B*15:01 |
| 2387 | AFP | ENSG00000081051 | GIASILDSY | 1694 | HLA-B*15:03 |
| 2388 | AFP | ENSG00000081051 | GIASILDSY | 1694 | HLA-B*27:05 |
| 2389 | AFP | ENSG00000081051 | GIASILDSY | 1694 | HLA-B*35:01 |
| 2390 | AFP | ENSG00000081051 | GIASILDSY | 1694 | HLA-B*44:03 |
| 2391 | AFP | ENSG00000081051 | GIASILDSY | 1694 | HLA-B*46:01 |
| 2392 | AFP | ENSG00000081051 | GIASILDSY | 1694 | HLA-B*55:01 |
| 2393 | AFP | ENSG00000081051 | GIASILDSY | 1694 | HLA-B*58:01 |
| 2394 | AFP | ENSG00000081051 | GIASILDSY | 1694 | HLA-C*02:02 |
| 2395 | AFP | ENSG00000081051 | GIASILDSY | 1694 | HLA-C*03:03 |
| 2396 | AFP | ENSG00000081051 | GIASILDSY | 1694 | HLA-C*07:04 |
| 2397 | AFP | ENSG00000081051 | GIASILDSY | 1694 | HLA-C*16:04 |
| 2398 | AFP | ENSG00000081051 | GLFQKLGEYYL | 1695 | HLA-A*02:01 |
| 2399 | AFP | ENSG00000081051 | GLFQKLGEYYL | 1695 | HLA-A*02:04 |
| 2400 | AFP | ENSG00000081051 | GLFQKLGEYY | 1696 | HLA-A*29:02 |
| 2401 | AFP | ENSG00000081051 | GLFQKLGEYY | 1696 | HLA-A*30:02 |
| 2402 | AFP | ENSG00000081051 | GLFQKLGEY | 1697 | HLA-A*03:01 |
| 2403 | AFP | ENSG00000081051 | GLFQKLGEY | 1697 | HLA-A*29:02 |
| 2404 | AFP | ENSG00000081051 | GLFQKLGEY | 1697 | HLA-A*30:02 |
| 2405 | AFP | ENSG00000081051 | GLFQKLGEY | 1697 | HLA-B*15:01 |
| 2406 | AFP | ENSG00000081051 | GLFQKLGEY | 1697 | HLA-B*15:03 |
| 2407 | AFP | ENSG00000081051 | GLFQKLGEY | 1697 | HLA-B*46:01 |
| 2408 | AFP | ENSG00000081051 | GLSPNLNRFL | 1698 | HLA-A*02:03 |
| 2409 | AFP | ENSG00000081051 | GLSPNLNRFL | 1698 | HLA-A*02:04 |
| 2410 | AFP | ENSG00000081051 | GLSPNLNRF | 1699 | HLA-B*15:01 |
| 2411 | AFP | ENSG00000081051 | GQKLISKTR | 1700 | HLA-A*31:01 |
| 2412 | AFP | ENSG00000081051 | GTRTFQAITV | 1701 | HLA-A*02:03 |
| 2413 | AFP | ENSG00000081051 | GTRTFQAITV | 1701 | HLA-C*06:02 |
| 2414 | AFP | ENSG00000081051 | HEKEILEKY | 1702 | HLA-A*29:02 |
| 2415 | AFP | ENSG00000081051 | HEKEILEKY | 1702 | HLA-A*30:01 |
| 2416 | AFP | ENSG00000081051 | HEKEILEKY | 1702 | HLA-A*30:02 |
| 2417 | AFP | ENSG00000081051 | HEKEILEKY | 1702 | HLA-B*15:03 |
| 2418 | AFP | ENSG00000081051 | HEKEILEKY | 1702 | HLA-B*18:01 |
| 2419 | AFP | ENSG00000081051 | HEKEILEKY | 1702 | HLA-B*44:02 |
| 2420 | AFP | ENSG00000081051 | HEKEILEKY | 1702 | HLA-B*44:03 |
| 2421 | AFP | ENSG00000081051 | HEKEILEKY | 1702 | HLA-C*02:02 |
| 2422 | AFP | ENSG00000081051 | HEKEILEKY | 1702 | HLA-C*16:04 |
| 2423 | AFP | ENSG00000081051 | HEMTPVNPGV | 1703 | HLA-A*30:01 |
| 2424 | AFP | ENSG00000081051 | HEMTPVNPGV | 1703 | HLA-B*40:01 |
| 2425 | AFP | ENSG00000081051 | HEMTPVNPGV | 1703 | HLA-B*49:01 |
| 2426 | AFP | ENSG00000081051 | HKKPTPASI | 1704 | HLA-B*15:03 |
| 2427 | AFP | ENSG00000081051 | HPFLYAPTI | 1705 | HLA-B*35:01 |
| 2428 | AFP | ENSG00000081051 | HPFLYAPTI | 1705 | HLA-B*35:03 |
| 2429 | AFP | ENSG00000081051 | HPFLYAPTI | 1705 | HLA-B*51:01 |
| 2430 | AFP | ENSG00000081051 | HPFLYAPTI | 1705 | HLA-B*54:01 |
| 2431 | AFP | ENSG00000081051 | HPFLYAPTI | 1705 | HLA-B*56:01 |
| 2432 | AFP | ENSG00000081051 | HPQLAVSVIL | 1706 | HLA-B*35:03 |
| 2433 | AFP | ENSG00000081051 | HPQLAVSVI | 1707 | HLA-B*07:02 |
| 2434 | AFP | ENSG00000081051 | HPQLAVSVI | 1707 | HLA-B*35:01 |
| 2435 | AFP | ENSG00000081051 | HPQLAVSVI | 1707 | HLA-B*35:03 |
| 2436 | AFP | ENSG00000081051 | HPQLAVSVI | 1707 | HLA-B*51:01 |
| 2437 | AFP | ENSG00000081051 | HPQLAVSVI | 1707 | HLA-B*54:01 |
| 2438 | AFP | ENSG00000081051 | HPQLAVSVI | 1707 | HLA-B*55:01 |
| 2439 | AFP | ENSG00000081051 | HPQLAVSVI | 1707 | HLA-B*56:01 |
| 2440 | AFP | ENSG00000081051 | HPQLAVSVI | 1707 | HLA-C*07:02 |
| 2441 | AFP | ENSG00000081051 | HPQLAVSV | 1708 | HLA-B*07:02 |
| 2442 | AFP | ENSG00000081051 | HPQLAVSV | 1708 | HLA-B*08:01 |
| 2443 | AFP | ENSG00000081051 | HPQLAVSV | 1708 | HLA-B*51:01 |
| 2444 | AFP | ENSG00000081051 | HPQLAVSV | 1708 | HLA-B*54:01 |
| 2445 | AFP | ENSG00000081051 | HPQLAVSV | 1708 | HLA-B*56:01 |
| 2446 | AFP | ENSG00000081051 | IADFSGLLEK | 1709 | HLA-A*01:01 |
| 2447 | AFP | ENSG00000081051 | IADFSGLLEK | 1709 | HLA-A*11:01 |
| 2448 | AFP | ENSG00000081051 | IADFSGLLEK | 1709 | HLA-B*27:02 |
| 2449 | AFP | ENSG00000081051 | IADFSGLL | 1710 | HLA-C*05:01 |
| 2450 | AFP | ENSG00000081051 | IASILDSY | 1711 | HLA-A*30:02 |
| 2451 | AFP | ENSG00000081051 | IASILDSY | 1711 | HLA-B*15:01 |
| 2452 | AFP | ENSG00000081051 | IASILDSY | 1711 | HLA-B*15:03 |
| 2453 | AFP | ENSG00000081051 | IASILDSY | 1711 | HLA-B*35:01 |
| 2454 | AFP | ENSG00000081051 | IASILDSY | 1711 | HLA-B*39:01 |
| 2455 | AFP | ENSG00000081051 | IASILDSY | 1711 | HLA-B*46:01 |
| 2456 | AFP | ENSG00000081051 | IASILDSY | 1711 | HLA-C*07:01 |
| 2457 | AFP | ENSG00000081051 | IASILDSY | 1711 | HLA-C*16:01 |
| 2458 | AFP | ENSG00000081051 | IASILDSY | 1711 | HLA-C*I6:02 |
| 2459 | AFP | ENSG00000081051 | ICSQQDTL | 1712 | HLA-B*39:01 |
| 2460 | AFP | ENSG00000081051 | IEKPTGDEQ | 1713 | HLA-B*40:02 |
| 2461 | AFP | ENSG00000081051 | IFLASFVHEY | 1714 | HLA-A*29:02 |
| 2462 | AFP | ENSG00000081051 | IFLASFVHEY | 1714 | HLA-A*30:02 |
| 2463 | AFP | ENSG00000081051 | IFLIFLLNF | 1715 | HLA-A*23:01 |
| 2464 | AFP | ENSG00000081051 | IFLIFLLNF | 1715 | HLA-A*24:02 |
| 2465 | AFP | ENSG00000081051 | IFLIFLLNF | 1715 | HLA-A*29:02 |
| 2466 | AFP | ENSG00000081051 | ILDSYQCTA | 1716 | HLA-A*02:01 |
| 2467 | AFP | ENSG00000081051 | ILDSYQCTA | 1716 | HLA-A*02:07 |
| 2468 | AFP | ENSG00000081051 | IPLFQVPEP | 1717 | HLA-B*54:01 |
| 2469 | AFP | ENSG00000081051 | IQESQALAKR | 1718 | HLA-C*07:06 |
| 2470 | AFP | ENSG00000081051 | IQESQALAK | 1719 | HLA-A*03:01 |
| 2471 | AFP | ENSG00000081051 | IQESQALAK | 1719 | HLA-A*03:02 |
| 2472 | AFP | ENSG00000081051 | IQESQALAK | 1719 | HLA-A*11:01 |
| 2473 | AFP | ENSG00000081051 | IQESQALAK | 1719 | HLA-B*27:05 |
| 2474 | AFP | ENSG00000081051 | IQKLVLDV | 1720 | HLA-B*13:02 |
| 2475 | AFP | ENSG00000081051 | ISKTRAAL | 1721 | HLA-B*08:01 |
| 2476 | AFP | ENSG00000081051 | ISKTRAAL | 1721 | HLA-C*16:01 |
| 2477 | AFP | ENSG00000081051 | ISLADLATIF | 1722 | HLA-B*57:01 |
| 2478 | AFP | ENSG00000081051 | ISLADLATI | 1723 | HLA-A*23:01 |
| 2479 | AFP | ENSG00000081051 | ISLADLATI | 1723 | HLA-B*58:01 |
| 2480 | AFP | ENSG00000081051 | ITVTKLSQKF | 1724 | HLA-B*57:01 |
| 2481 | AFP | ENSG00000081051 | ITVTKLSQKF | 1724 | HLA-B*58:01 |
| 2482 | AFP | ENSG00000081051 | ITVTKLSQK | 1725 | HLA-A*03:01 |
| 2483 | AFP | ENSG00000081051 | ITVTKLSQK | 1725 | HLA-A*03:02 |
| 2484 | AFP | ENSG00000081051 | ITVTKLSQK | 1725 | HLA-A*11:01 |
| 2485 | AFP | ENSG00000081051 | ITVTKLSQK | 1725 | HLA-A*68:01 |
| 2486 | AFP | ENSG00000081051 | ITVTKLSQK | 1725 | HLA-C*07:06 |
| 2487 | AFP | ENSG00000081051 | KAATVTKEL | 1726 | HLA-A*23:01 |
| 2488 | AFP | ENSG00000081051 | KAATVTKEL | 1726 | HLA-A*24:02 |
| 2489 | AFP | ENSG00000081051 | KAATVTKEL | 1726 | HLA-A*32:01 |
| 2490 | AFP | ENSG00000081051 | KAATVTKEL | 1726 | HLA-B*07:02 |
| 2491 | AFP | ENSG00000081051 | KAATVTKEL | 1726 | HLA-B*15:01 |
| 2492 | AFP | ENSG00000081051 | KAATVTKEL | 1726 | HLA-B*15:03 |
| 2493 | AFP | ENSG00000081051 | KAATVTKEL | 1726 | HLA-B*40:01 |
| 2494 | AFP | ENSG00000081051 | KAATVTKEL | 1726 | HLA-B*40:02 |
| 2495 | AFP | ENSG00000081051 | KAATVTKEL | 1726 | HLA-B*46:01 |
| 2496 | AFP | ENSG00000081051 | KAATVTKEL | 1726 | HLA-B*57:01 |
| 2497 | AFP | ENSG00000081051 | KAATVTKEL | 1726 | HLA-B*58:01 |
| 2498 | AFP | ENSG00000081051 | KAATVTKEL | 1726 | HLA-C*01:02 |
| 2499 | AFP | ENSG00000081051 | KAATVTKEL | 1726 | HLA-C*02:02 |
| 2500 | AFP | ENSG00000081051 | KAATVTKEL | 1726 | HLA-C*03:03 |
| 2501 | AFP | ENSG00000081051 | KAATVTKEL | 1726 | HLA-C*03:04 |
| 2502 | AFP | ENSG00000081051 | KAATVTKEL | 1726 | HLA-C*06:02 |
| 2503 | AFP | ENSG00000081051 | KAATVTKEL | 1726 | HLA-C*07:02 |
| 2504 | AFP | ENSG00000081051 | KAATVTKEL | 1726 | HLA-C*12:03 |
| 2505 | AFP | ENSG00000081051 | KAATVTKEL | 1726 | HLA-C*14:02 |
| 2506 | AFP | ENSG00000081051 | KAATVTKEL | 1726 | HLA-C*16:01 |
| 2507 | AFP | ENSG00000081051 | KAATVTKEL | 1726 | HLA-C*16:02 |
| 2508 | AFP | ENSG00000081051 | KAATVTKEL | 1726 | HLA-C*16:04 |
| 2509 | AFP | ENSG00000081051 | KAENAVECF | 1727 | HLA-B*58:01 |
| 2510 | AFP | ENSG00000081051 | KAENAVECF | 1727 | HLA-C*05:01 |
| 2511 | AFP | ENSG00000081051 | KAENAVECF | 1727 | HLA-C*07:04 |
| 2512 | AFP | ENSG00000081051 | KAPQLTSSEL | 1728 | HLA-B*07:02 |
| 2513 | AFP | ENSG00000081051 | KAPQLTSSEL | 1728 | HLA-B*58:01 |
| 2514 | AFP | ENSG00000081051 | KAPQLTSSEL | 1728 | HLA-C*01:02 |
| 2515 | AFP | ENSG00000081051 | KDALTAIEK | 1729 | HLA-A*03:02 |
| 2516 | AFP | ENSG00000081051 | KDLCQAQGV | 1730 | HLA-B*37:01 |
| 2517 | AFP | ENSG00000081051 | KELRESSLL | 1731 | HLA-B*37:01 |
| 2518 | AFP | ENSG00000081051 | KELRESSLL | 1731 | HLA-B*40:01 |
| 2519 | AFP | ENSG00000081051 | KELRESSLL | 1731 | HLA-B*40:02 |
| 2520 | AFP | ENSG00000081051 | KELRESSL | 1732 | HLA-B*37:01 |
| 2521 | AFP | ENSG00000081051 | KFIYEIARR | 1733 | HLA-A*31:01 |
| 2522 | AFP | ENSG00000081051 | KGEEELQKY | 1734 | HLA-A*01:01 |
| 2523 | AFP | ENSG00000081051 | KGEEELQKY | 1734 | HLA-A*30:02 |
| 2524 | AFP | ENSG00000081051 | KGYQELLEK | 1735 | HLA-A*03:01 |
| 2525 | AFP | ENSG00000081051 | KGYQELLEK | 1735 | HLA-A*03:02 |
| 2526 | AFP | ENSG00000081051 | KGYQELLEK | 1735 | HLA-A*11:01 |
| 2527 | AFP | ENSG00000081051 | KKAPQLTSSEL | 1736 | HLA-B*15:03 |
| 2528 | AFP | ENSG00000081051 | KLSQKFTKV | 1737 | HLA-A*02:03 |
| 2529 | AFP | ENSG00000081051 | KLVLDVAHV | 1738 | HLA-A*02:01 |
| 2530 | AFP | ENSG00000081051 | KLVLDVAHV | 1738 | HLA-A*02:03 |
| 2531 | AFP | ENSG00000081051 | KLVLDVAHV | 1738 | HLA-A*02:04 |
| 2532 | AFP | ENSG00000081051 | KLVLDVAHV | 1738 | HLA-A*02:07 |
| 2533 | AFP | ENSG00000081051 | KMAATAATC | 1739 | HLA-A*02:01 |
| 2534 | AFP | ENSG00000081051 | KMAATAATC | 1739 | HLA-B*55:01 |
| 2535 | AFP | ENSG00000081051 | KMVKDALTAI | 1740 | HLA-A*02:03 |
| 2536 | AFP | ENSG00000081051 | KPEGLSPNL | 1741 | HLA-B*07:02 |
| 2537 | AFP | ENSG00000081051 | KPEGLSPNL | 1741 | HLA-B*35:03 |
| 2538 | AFP | ENSG00000081051 | KPEGLSPNL | 1741 | HLA-C*07:02 |
| 2539 | AFP | ENSG00000081051 | KPQITEEQLEA | 1742 | HLA-B*56:01 |
| 2540 | AFP | ENSG00000081051 | KPQITEEQL | 1743 | HLA-B*07:02 |
| 2541 | AFP | ENSG00000081051 | KPQITEEQL | 1743 | HLA-B*35:03 |
| 2542 | AFP | ENSG00000081051 | KPQITEEQL | 1743 | HLA-C*07:02 |
| 2543 | AFP | ENSG00000081051 | KPTPASIPLF | 1744 | HLA-A*23:01 |
| 2544 | AFP | ENSG00000081051 | KPTPASIPLF | 1744 | HLA-A*24:02 |
| 2545 | AFP | ENSG00000081051 | KPTPASIPL | 1745 | HLA-B*07:02 |
| 2546 | AFP | ENSG00000081051 | KPTPASIPL | 1745 | HLA-B*35:03 |
| 2547 | AFP | ENSG00000081051 | KPTPASIPL | 1745 | HLA-C*07:02 |
| 2548 | AFP | ENSG00000081051 | KTRAALGV | 1746 | HLA-C*06:02 |
| 2549 | AFP | ENSG00000081051 | KVNFTEIQKL | 1747 | HLA-A*03:01 |
| 2550 | AFP | ENSG00000081051 | KVNFTEIQK | 1748 | HLA-A*03:01 |
| 2551 | AFP | ENSG00000081051 | KVNFTEIQK | 1748 | HLA-A*03:02 |
| 2552 | AFP | ENSG00000081051 | KVNFTEIQK | 1748 | HLA-A*11:01 |
| 2553 | AFP | ENSG00000081051 | KWVESIFLIF | 1749 | HLA-A*24:02 |
| 2554 | AFP | ENSG00000081051 | KWVESIFLI | 1750 | HLA-A*24:02 |
| 2555 | AFP | ENSG00000081051 | KYIQESQALAK | 1751 | HLA-A*03:01 |
| 2556 | AFP | ENSG00000081051 | KYIQESQALAK | 1751 | HLA-A*03:02 |
| 2557 | AFP | ENSG00000081051 | KYIQESQALAK | 1751 | HLA-A*11:01 |
| 2558 | AFP | ENSG00000081051 | KYIQESQALAK | 1751 | HLA-A*31:01 |
| 2559 | AFP | ENSG00000081051 | KYIQESQALAK | 1751 | HLA-A*33:03 |
| 2560 | AFP | ENSG00000081051 | KYIQESQAL | 1752 | HLA-A*23:01 |
| 2561 | AFP | ENSG00000081051 | KYIQESQAL | 1752 | HLA-A*24:02 |
| 2562 | AFP | ENSG00000081051 | KYIQESQAL | 1752 | HLA-A*30:01 |
| 2563 | AFP | ENSG00000081051 | KYIQESQAL | 1752 | HLA-A*31:01 |
| 2564 | AFP | ENSG00000081051 | KYIQESQAL | 1752 | HLA-A*32:01 |
| 2565 | AFP | ENSG00000081051 | KYIQESQAL | 1752 | HLA-B*15:01 |
| 2566 | AFP | ENSG00000081051 | KYIQESQAL | 1752 | HLA-B*15:03 |
| 2567 | AFP | ENSG00000081051 | KYIQESQAL | 1752 | HLA-B*27:05 |
| 2568 | AFP | ENSG00000081051 | KYIQESQAL | 1752 | HLA-B*35:03 |
| 2569 | AFP | ENSG00000081051 | KYIQESQAL | 1752 | HLA-B*38:01 |
| 2570 | AFP | ENSG00000081051 | KYIQESQAL | 1752 | HLA-B*40:01 |
| 2571 | AFP | ENSG00000081051 | KYIQESQAL | 1752 | HLA-B*40:02 |
| 2572 | AFP | ENSG00000081051 | KYIQESQAL | 1752 | HLA-B*46:01 |
| 2573 | AFP | ENSG00000081051 | KYIQESQAL | 1752 | HLA-B*58:01 |
| 2574 | AFP | ENSG00000081051 | KYIQESQAL | 1752 | HLA-C*01:02 |
| 2575 | AFP | ENSG00000081051 | KYIQESQAL | 1752 | HLA-C*03:03 |
| 2576 | AFP | ENSG00000081051 | KYIQESQAL | 1752 | HLA-C*03:04 |
| 2577 | AFP | ENSG00000081051 | KYIQESQAL | 1752 | HLA-C*04:01 |
| 2578 | AFP | ENSG00000081051 | KYIQESQAL | 1752 | HLA-C*06:02 |
| 2579 | AFP | ENSG00000081051 | KYIQESQAL | 1752 | HLA-C*07:02 |
| 2580 | AFP | ENSG00000081051 | KYIQESQAL | 1752 | HLA-C*14:02 |
| 2581 | AFP | ENSG00000081051 | KYIQESQAL | 1752 | HLA-C*16:01 |
| 2582 | AFP | ENSG00000081051 | KYIQESQAL | 1752 | HLA-C*16:02 |
| 2583 | AFP | ENSG00000081051 | KYIQESQAL | 1752 | HLA-C*16:04 |
| 2584 | AFP | ENSG00000081051 | LADLATIFF | 1753 | HLA-A*01:01 |
| 2585 | AFP | ENSG00000081051 | LADLATIFF | 1753 | HLA-A*02:07 |
| 2586 | AFP | ENSG00000081051 | LADLATIFF | 1753 | HLA-B*35:01 |
| 2587 | AFP | ENSG00000081051 | LADLATIFF | 1753 | HLA-B*38:01 |
| 2588 | AFP | ENSG00000081051 | LADLATIFF | 1753 | HLA-C*02:02 |
| 2589 | AFP | ENSG00000081051 | LADLATIFF | 1753 | HLA-C*04:01 |
| 2590 | AFP | ENSG00000081051 | LADLATIFF | 1753 | HLA-C*05:01 |
| 2591 | AFP | ENSG00000081051 | LADLATIF | 1754 | HLA-B*35:01 |
| 2592 | AFP | ENSG00000081051 | LADLATIF | 1754 | HLA-C*05:01 |
| 2593 | AFP | ENSG00000081051 | LAHKKPTPA | 1755 | HLA-B*54:01 |
| 2594 | AFP | ENSG00000081051 | LASFVHEY | 1756 | HLA-A*01:01 |
| 2595 | AFP | ENSG00000081051 | LASFVHEY | 1756 | HLA-A*29:02 |
| 2596 | AFP | ENSG00000081051 | LASFVHEY | 1756 | HLA-A*30:02 |
| 2597 | AFP | ENSG00000081051 | LASFVHEY | 1756 | HLA-A*32:01 |
| 2598 | AFP | ENSG00000081051 | LASFVHEY | 1756 | HLA-B*15:01 |
| 2599 | AFP | ENSG00000081051 | LASFVHEY | 1756 | HLA-B*15:03 |
| 2600 | AFP | ENSG00000081051 | LASFVHEY | 1756 | HLA-B*18:01 |
| 2601 | AFP | ENSG00000081051 | LASFVHEY | 1756 | HLA-B*35:01 |
| 2602 | AFP | ENSG00000081051 | LASFVHEY | 1756 | HLA-B*39:01 |
| 2603 | AFP | ENSG00000081051 | LASFVHEY | 1756 | HLA-B*46:01 |
| 2604 | AFP | ENSG00000081051 | LASFVHEY | 1756 | HLA-B*58:01 |
| 2605 | AFP | ENSG00000081051 | LASFVHEY | 1756 | HLA-C*01:02 |
| 2606 | AFP | ENSG00000081051 | LASFVHEY | 1756 | HLA-C*02:02 |
| 2607 | AFP | ENSG00000081051 | LASFVHEY | 1756 | HLA-C*03:03 |
| 2608 | AFP | ENSG00000081051 | LASFVHEY | 1756 | HLA-C*07:01 |
| 2609 | AFP | ENSG00000081051 | LASFVHEY | 1756 | HLA-C*07:04 |
| 2610 | AFP | ENSG00000081051 | LASFVHEY | 1756 | HLA-C*12:03 |
| 2611 | AFP | ENSG00000081051 | LASFVHEY | 1756 | HLA-C*16:01 |
| 2612 | AFP | ENSG00000081051 | LASFVHEY | 1756 | HLA-C*16:02 |
| 2613 | AFP | ENSG00000081051 | LASFVHEY | 1756 | HLA-C*16:04 |
| 2614 | AFP | ENSG00000081051 | LATIFFAQF | 1757 | HLA-B*57:01 |
| 2615 | AFP | ENSG00000081051 | LATIGGAQF | 1757 | HLA-C*02:02 |
| 2616 | AFP | ENSG00000081051 | LAVSVILRVA | 1758 | HLA-B*54:01 |
| 2617 | AFP | ENSG00000081051 | LAVSVILRV | 1759 | HLA-A*02:04 |
| 2618 | AFP | ENSG00000081051 | LAVSVILRV | 1759 | HLA-A*02:07 |
| 2619 | AFP | ENSG00000081051 | LAVSVILRV | 1759 | HLA-A*68:02 |
| 2620 | AFP | ENSG00000081051 | LAVSVILRV | 1759 | HLA-B*13:02 |
| 2621 | AFP | ENSG00000081051 | LAVSVILRV | 1759 | HLA-B*51:01 |
| 2622 | AFP | ENSG00000081051 | LAVSVILRV | 1759 | HLA-B*54:01 |
| 2623 | AFP | ENSG00000081051 | LAVSVILRV | 1759 | HLA-C*02:02 |
| 2624 | AFP | ENSG00000081051 | LAVSVILRV | 1759 | HLA-C*12:03 |
| 2625 | AFP | ENSG00000081051 | LCQAQGVAL | 1760 | HLA-C*01:02 |
| 2626 | AFP | ENSG00000081051 | LCQAQGVAL | 1760 | HLA-C*03:03 |
| 2627 | AFP | ENSG00000081051 | LCQAQGVAL | 1760 | HLA-C*03:04 |
| 2628 | AFP | ENSG00000081051 | LCQAQGVAL | 1760 | HLA-C*14:02 |
| 2629 | AFP | ENSG00000081051 | LEAVIADF | 1761 | HLA-B*18:01 |
| 2630 | AFP | ENSG00000081051 | LEAVIADF | 1761 | HLA-B*37:01 |
| 2631 | AFP | ENSG00000081051 | LENQLPAFL | 1762 | HLA-B*18:01 |
| 2632 | AFP | ENSG00000081051 | LENQLPAFL | 1762 | HLA-B*40:01 |
| 2633 | AFP | ENSG00000081051 | LENQLPAFL | 1762 | HLA-B*44:02 |
| 2634 | AFP | ENSG00000081051 | LENQLPAFL | 1762 | HLA-B*44:03 |
| 2635 | AFP | ENSG00000081051 | LENQLPAFL | 1762 | HLA-B*49:01 |
| 2636 | AFP | ENSG00000081051 | LENQLPAF | 1763 | HLA-B*18:01 |
| 2637 | AFP | ENSG00000081051 | LENQLPAF | 1763 | HLA-B*37:01 |
| 2638 | AFP | ENSG00000081051 | LFQKLGEYY | 1764 | HLA-A*29:02 |
| 2639 | AFP | ENSG00000081051 | LFQKLGEYY | 1764 | HLA-A*30:02 |
| 2640 | AFP | ENSG00000081051 | LFQKLGEY | 1765 | HLA-A*30:02 |
| 2641 | AFP | ENSG00000081051 | LFQKLGEY | 1765 | HLA-C*14:02 |
| 2642 | AFP | ENSG00000081051 | LGDRDFNQF | 1766 | HLA-A*01:01 |
| 2643 | AFP | ENSG00000081051 | LGDRDFNQF | 1766 | HLA-B*38:01 |
| 2644 | AFP | ENSG00000081051 | LGDRDFNQF | 1766 | HLA-C*05:01 |
| 2645 | AFP | ENSG00000081051 | LLNQHACAV | 1767 | HLA-A*02:01 |
| 2646 | AFP | ENSG00000081051 | LLNQHACAV | 1767 | HLA-A*02:03 |
| 2647 | AFP | ENSG00000081051 | LLNQHACAV | 1767 | HLA-B*55:01 |
| 2648 | AFP | ENSG00000081051 | LNFTESRTL | 1768 | HLA-C*03:03 |
| 2649 | AFP | ENSG00000081051 | LNFTESRTL | 1768 | HLA-C*03:04 |
| 2650 | AFP | ENSG00000081051 | LNFTESRTL | 1768 | HLA-C*I6:01 |
| 2651 | AFP | ENSG00000081051 | LPAFLEEL | 1769 | HLA-B*35:01 |
| 2652 | AFP | ENSG00000081051 | LPAFLEEL | 1769 | HLA-B*35:03 |
| 2653 | AFP | ENSG00000081051 | LPAFLEEL | 1769 | HLA-B*51:01 |
| 2654 | AFP | ENSG00000081051 | LPAFLEEL | 1769 | HLA-B*56:01 |
| 2655 | AFP | ENSG00000081051 | LQDGEKIMSY | 1770 | HLA-A*01:01 |
| 2656 | AFP | ENSG00000081051 | LQDGEKIMSY | 1770 | HLA-A*30:02 |
| 2657 | AFP | ENSG00000081051 | LQDGEKIMSY | 1770 | HLA-B*15:01 |
| 2658 | AFP | ENSG00000081051 | LQDGEKIMSY | 1770 | HLA-C*07:04 |
| 2659 | AFP | ENSG00000081051 | LQDGEKIM | 1771 | HLA-C*05:01 |
| 2660 | AFP | ENSG00000081051 | LQNAFLVAY | 1772 | HLA-A*03:01 |
| 2661 | AFP | ENSG00000081051 | LQNAFLVAY | 1772 | HLA-A*26:01 |
| 2662 | AFP | ENSG00000081051 | LQNAFLVAY | 1772 | HLA-A*29:02 |
| 2663 | AFP | ENSG00000081051 | LQNAFLVAY | 1772 | HLA-A*30:02 |
| 2664 | AFP | ENSG00000081051 | LQNAFLVAY | 1772 | HLA-A*31:01 |
| 2665 | AFP | ENSG00000081051 | LQNAFLVAY | 1772 | HLA-A*32:01 |
| 2666 | AFP | ENSG00000081051 | LQNAFLVAY | 1772 | HLA-B*15:01 |
| 2667 | AFP | ENSG00000081051 | LQNAFLVAY | 1772 | HLA-B*15:03 |
| 2668 | AFP | ENSG00000081051 | LQNAFLVAY | 1772 | HLA-B*18:01 |
| 2669 | AFP | ENSG00000081051 | LQNAFLVAY | 1772 | HLA-B*27:02 |
| 2670 | AFP | ENSG00000081051 | LQNAFLVAY | 1772 | HLA-B*27:05 |
| 2671 | AFP | ENSG00000081051 | LQNAFLVAY | 1772 | HLA-B*35:01 |
| 2672 | AFP | ENSG00000081051 | LQNAFLVAY | 1772 | HLA-B*39:01 |
| 2673 | AFP | ENSG00000081051 | LQNAFLVAY | 1772 | HLA-B*44:02 |
| 2674 | AFP | ENSG00000081051 | LQNAFLVAY | 1772 | HLA-B*44:03 |
| 2675 | AFP | ENSG00000081051 | LQNAFLVAY | 1772 | HLA-B*46:01 |
| 2676 | AFP | ENSG00000081051 | LQNAFLVAY | 1772 | HLA-C*01:02 |
| 2677 | AFP | ENSG00000081051 | LQNAFLVAY | 1772 | HLA-C*02:02 |
| 2678 | AFP | ENSG00000081051 | LQNAFLVAY | 1772 | HLA-C*03:03 |
| 2679 | AFP | ENSG00000081051 | LQNAFLVAY | 1772 | HLA-C*07:01 |
| 2680 | AFP | ENSG00000081051 | LQNAFLVAY | 1772 | HLA-C*07:04 |
| 2681 | AFP | ENSG00000081051 | LQNAFLVAY | 1772 | HLA-C*12:03 |
| 2682 | AFP | ENSG00000081051 | LQNAFLVAY | 1772 | HLA-C*14:02 |
| 2683 | AFP | ENSG00000081051 | LQNAFLVAY | 1772 | HLA-C*16:01 |
| 2684 | AFP | ENSG00000081051 | LQNAFLVAY | 1772 | HLA-C*16:02 |
| 2685 | AFP | ENSG00000081051 | LQNAFLVAY | 1772 | HLA-C*16:04 |
| 2686 | AFP | ENSG00000081051 | LQTIVEKQEF | 1773 | HLA-B*15:01 |
| 2687 | AFP | ENSG00000081051 | LSQKFTKVNF | 1774 | HLA-B*57:01 |
| 2688 | AFP | ENSG00000081051 | LSQKFTKVNF | 1774 | HLA-B*58:01 |
| 2689 | AFP | ENSG00000081051 | LTSSELMAITR | 1775 | HLA-A*33:03 |
| 2690 | AFP | ENSG00000081051 | LTSSELMAITR | 1775 | HLA-A*68:01 |
| 2691 | AFP | ENSG00000081051 | LTSSELMAITR | 1775 | HLA-B*27:02 |
| 2692 | AFP | ENSG00000081051 | LTSSELMAITR | 1775 | HLA-C*07:06 |
| 2693 | AFP | ENSG00000081051 | LVKQKPQI | 1776 | HLA-B*08:01 |
| 2694 | AFP | ENSG00000081051 | LYAPTILLW | 1777 | HLA-A*23:01 |
| 2695 | AFP | ENSG00000081051 | LYAPTILLW | 1777 | HLA-A*24:02 |
| 2696 | AFP | ENSG00000081051 | LYAPTILLW | 1777 | HLA-A*29:02 |
| 2697 | AFP | ENSG00000081051 | LYAPTILLW | 1777 | HLA-B*57:01 |
| 2698 | AFP | ENSG00000081051 | LYAPTILL | 1778 | HLA-A*23:01 |
| 2699 | AFP | ENSG00000081051 | LYAPTILL | 1778 | HLA-A*24:02 |
| 2700 | AFP | ENSG00000081051 | MAATAATCC | 1779 | HLA-B*51:01 |
| 2701 | AFP | ENSG00000081051 | MAATAATCC | 1779 | HLA-B*54:01 |
| 2702 | AFP | ENSG00000081051 | MAATAATCC | 1779 | HLA-C*03:03 |
| 2703 | AFP | ENSG00000081051 | MAATAATCC | 1779 | HLA-C*03:04 |
| 2704 | AFP | ENSG00000081051 | MAATAATC | 1780 | HLA-B*51:01 |
| 2705 | AFP | ENSG00000081051 | MAATAATC | 1780 | HLA-C*03:04 |
| 2706 | AFP | ENSG00000081051 | MAITRKMAA | 1781 | HLA-B*08:01 |
| 2707 | AFP | ENSG00000081051 | MAITRKMAA | 1781 | HLA-B*54:01 |
| 2708 | AFP | ENSG00000081051 | MAITRKMAA | 1781 | HLA-C*16:01 |
| 2709 | AFP | ENSG00000081051 | MVKDALTAIEK | 1782 | HLA-A*03:01 |
| 2710 | AFP | ENSG00000081051 | MVKDALTAIEK | 1782 | HLA-A*03:02 |
| 2711 | AFP | ENSG00000081051 | MVKDALTAIEK | 1782 | HLA-A*11:01 |
| 2712 | AFP | ENSG00000081051 | MVKDALTAIEK | 1782 | HLA-A*31:01 |
| 2713 | AFP | ENSG00000081051 | MVKDALTAIEK | 1782 | HLA-A*33:01 |
| 2714 | AFP | ENSG00000081051 | MVKDALTAIEK | 1782 | HLA-A*33:03 |
| 2715 | AFP | ENSG00000081051 | MVKDALTAIEK | 1782 | HLA-A*68:01 |
| 2716 | AFP | ENSG00000081051 | MVKDALTAI | 1783 | HLA-A*02:03 |
| 2717 | AFP | ENSG00000081051 | MVKDALTAI | 1783 | HLA-A*23:01 |
| 2718 | AFP | ENSG00000081051 | MVKDALTAI | 1783 | HLA-A*25:01 |
| 2719 | AFP | ENSG00000081051 | MVKDALTAI | 1783 | HLA-A*26:01 |
| 2720 | AFP | ENSG00000081051 | MVKDALTAI | 1783 | HLA-A*32:01 |
| 2721 | AFP | ENSG00000081051 | MVKDALTAI | 1783 | HLA-A*33:03 |
| 2722 | AFP | ENSG00000081051 | MVKDALTAI | 1783 | HLA-A*68:02 |
| 2723 | AFP | ENSG00000081051 | MVKDALTAI | 1783 | HLA-B*08:01 |
| 2724 | AFP | ENSG00000081051 | MVKDALTAI | 1783 | HLA-B*40:02 |
| 2725 | AFP | ENSG00000081051 | MVKDALTAI | 1783 | HLA-B*46:01 |
| 2726 | AFP | ENSG00000081051 | MVKDALTAI | 1783 | HLA-B*51:01 |
| 2727 | AFP | ENSG00000081051 | MVKDALTAI | 1783 | HLA-B*54:01 |
| 2728 | AFP | ENSG00000081051 | MVKDALTAI | 1783 | HLA-C*01:02 |
| 2729 | AFP | ENSG00000081051 | MVKDALTAI | 1783 | HLA-C*02:02 |
| 2730 | AFP | ENSG00000081051 | MVKDALTAI | 1783 | HLA-C*03:03 |
| 2731 | AFP | ENSG00000081051 | MVKDALTAI | 1783 | HLA-C*03:04 |
| 2732 | AFP | ENSG00000081051 | MVKDALTAI | 1783 | HLA-C*07:04 |
| 2733 | AFP | ENSG00000081051 | MVKDALTAI | 1783 | HLA-C*14:02 |
| 2734 | AFP | ENSG00000081051 | NAFLVAYTK | 1784 | HLA-A*11:01 |
| 2735 | AFP | ENSG00000081051 | NAFLVAYTK | 1784 | HLA-A*68:01 |
| 2736 | AFP | ENSG00000081051 | NAFLVAYTK | 1784 | HLA-B*35:01 |
| 2737 | AFP | ENSG00000081051 | NAFLVAYTK | 1784 | HLA-C*07:06 |
| 2738 | AFP | ENSG00000081051 | NAVECFQTK | 1785 | HLA-A*33:01 |
| 2739 | AFP | ENSG00000081051 | NAVECFQTK | 1785 | HLA-A*68:01 |
| 2740 | AFP | ENSG00000081051 | NAVECFQTK | 1785 | HLA-C*07:06 |
| 2741 | AFP | ENSG00000081051 | NEYGIASIL | 1786 | HLA-A*30:01 |
| 2742 | AFP | ENSG00000081051 | NEYGIASIL | 1786 | HLA-B*18:01 |
| 2743 | AFP | ENSG00000081051 | NEYGIASIL | 1786 | HLA-B*37:01 |
| 2744 | AFP | ENSG00000081051 | NEYGIASIL | 1786 | HLA-B*39:01 |
| 2745 | AFP | ENSG00000081051 | NEYGIASIL | 1786 | HLA-B*40:01 |
| 2746 | AFP | ENSG00000081051 | NEYGIASIL | 1786 | HLA-B*40:02 |
| 2747 | AFP | ENSG00000081051 | NEYGIASIL | 1786 | HLA-B*44:02 |
| 2748 | AFP | ENSG00000081051 | NEYGIASIL | 1786 | HLA-B*44:03 |
| 2749 | AFP | ENSG00000081051 | NEYGIASIL | 1786 | HLA-B*49:01 |
| 2750 | AFP | ENSG00000081051 | NEYGIASIL | 1786 | HLA-C*02:02 |
| 2751 | AFP | ENSG00000081051 | NEYGIASIL | 1786 | HLA-C*12:03 |
| 2752 | AFP | ENSG00000081051 | NEYGIASIL | 1786 | HLA-C*14:02 |
| 2753 | AFP | ENSG00000081051 | NEYGIASIL | 1786 | HLA-C*16:04 |
| 2754 | AFP | ENSG00000081051 | NEYGIASI | 1787 | HLA-A*30:01 |
| 2755 | AFP | ENSG00000081051 | NEYGIASI | 1787 | HLA-B*18:01 |
| 2756 | AFP | ENSG00000081051 | NEYGIASI | 1787 | HLA-B*37:01 |
| 2757 | AFP | ENSG00000081051 | NEYGIASI | 1787 | HLA-B*49:01 |
| 2758 | AFP | ENSG00000081051 | NFTEIQKL | 1788 | HLA-C*14:02 |
| 2759 | AFP | ENSG00000081051 | NFTESRTL | 1789 | HLA-C*01:02 |
| 2760 | AFP | ENSG00000081051 | NFTESRTL | 1789 | HLA-C*14:02 |
| 2761 | AFP | ENSG00000081051 | NFTESRTL | 1789 | HLA-C*16:01 |
| 2762 | AFP | ENSG00000081051 | NIFLASFVHEY | 1790 | HLA-A*29:02 |
| 2763 | AFP | ENSG00000081051 | NQFSSGEKNIF | 1791 | HLA-B*38:01 |
| 2764 | AFP | ENSG00000081051 | NQFSSGEKNI | 1792 | HLA-B*13:02 |
| 2765 | AFP | ENSG00000081051 | PFLYAPTI | 1793 | HLA-A*23:01 |
| 2766 | AFP | ENSG00000081051 | PTPASIPLF | 1794 | HLA-A*24:02 |
| 2767 | AFP | ENSG00000081051 | PTPASIPLF | 1794 | HLA-A*26:01 |
| 2768 | AFP | ENSG00000081051 | QAITVTKLSQK | 1795 | HLA-A*03:02 |
| 2769 | AFP | ENSG00000081051 | QAITVTKLSQK | 1795 | HLA-A*11:01 |
| 2770 | AFP | ENSG00000081051 | QAITVTKLSQK | 1795 | HLA-A*31:01 |
| 2771 | AFP | ENSG00000081051 | QAITVTKLSQK | 1795 | HLA-A*68:01 |
| 2772 | AFP | ENSG00000081051 | QAITVTKLSQK | 1795 | HLA-C*07:06 |
| 2773 | AFP | ENSG00000081051 | QAITVTKL | 1796 | HLA-A*23:01 |
| 2774 | AFP | ENSG00000081051 | QAITVTKL | 1796 | HLA-A*24:02 |
| 2775 | AFP | ENSG00000081051 | QAITVTKL | 1796 | HLA-A*30:01 |
| 2776 | AFP | ENSG00000081051 | QAITVTKL | 1796 | HLA-A*32:01 |
| 2777 | AFP | ENSG00000081051 | QAITVTKL | 1796 | HLA-B*08:01 |
| 2778 | AFP | ENSG00000081051 | QAITVTKL | 1796 | HLA-B*15:01 |
| 2779 | AFP | ENSG00000081051 | QAITVTKL | 1796 | HLA-B*15:03 |
| 2780 | AFP | ENSG00000081051 | QAITVTKL | 1796 | HLA-B*18:01 |
| 2781 | AFP | ENSG00000081051 | QAITVTKL | 1796 | HLA-B*35:03 |
| 2782 | AFP | ENSG00000081051 | QAITVTKL | 1796 | HLA-B*40:01 |
| 2783 | AFP | ENSG00000081051 | QAITVTKL | 1796 | HLA-B*40:02 |
| 2784 | AFP | ENSG00000081051 | QAITVTKL | 1796 | HLA-B*46:01 |
| 2785 | AFP | ENSG00000081051 | QAITVTKL | 1796 | HLA-B*51:01 |
| 2786 | AFP | ENSG00000081051 | QAITVTKL | 1796 | HLA-B*58:01 |
| 2787 | AFP | ENSG00000081051 | QAITVTKL | 1796 | HLA-C*01:02 |
| 2788 | AFP | ENSG00000081051 | QAITVTKL | 1796 | HLA-C*02:02 |
| 2789 | AFP | ENSG00000081051 | QAITVTKL | 1796 | HLA-C*03:03 |
| 2790 | AFP | ENSG00000081051 | QAITVTKL | 1796 | HLA-C*03:04 |
| 2791 | AFP | ENSG00000081051 | QAITVTKL | 1796 | HLA-C*05:01 |
| 2792 | AFP | ENSG00000081051 | QAITVTKL | 1796 | HLA-C*06:02 |
| 2793 | AFP | ENSG00000081051 | QAITVTKL | 1796 | HLA-C*07:01 |
| 2794 | AFP | ENSG00000081051 | QAITVTKL | 1796 | HLA-C*12:03 |
| 2795 | AFP | ENSG00000081051 | QAITVTKL | 1796 | HLA-C*16:01 |
| 2796 | AFP | ENSG00000081051 | QAITVTKL | 1796 | HLA-C*16:02 |
| 2797 | AFP | ENSG00000081051 | QAQGVALQTMK | 1797 | HLA-A*03:02 |
| 2798 | AFP | ENSG00000081051 | QAQGVALQTMK | 1797 | HLA-A*11:01 |
| 2799 | AFP | ENSG00000081051 | QAQGVALQTMK | 1797 | HLA-A*68:01 |
| 2800 | AFP | ENSG00000081051 | QAQGVALQTMK | 1797 | HLA-B*27:02 |
| 2801 | AFP | ENSG00000081051 | QAQGVALQTM | 1798 | HLA-B*35:01 |
| 2802 | AFP | ENSG00000081051 | QAQGVALQTM | 1798 | HLA-B*35:03 |
| 2803 | AFP | ENSG00000081051 | QAQGVALQTM | 1798 | HLA-B*58:01 |
| 2804 | AFP | ENSG00000081051 | QAQGVALQTM | 1798 | HLA-C*03:04 |
| 2805 | AFP | ENSG00000081051 | QAQGVALQTM | 1798 | HLA-C*04:01 |
| 2806 | AFP | ENSG00000081051 | QAQGVALQTM | 1798 | HLA-C*07:06 |
| 2807 | AFP | ENSG00000081051 | QAQGVALQTM | 1798 | HLA-C*16:02 |
| 2808 | AFP | ENSG00000081051 | QDGEKIMSY | 1799 | HLA-B*18:01 |
| 2809 | AFP | ENSG00000081051 | QDGEKIMSY | 1799 | HLA-B*37:01 |
| 2810 | AFP | ENSG00000081051 | QDGEKIMSY | 1799 | HLA-B*44:02 |
| 2811 | AFP | ENSG00000081051 | QDGEKIMSY | 1799 | HLA-B*44:03 |
| 2812 | AFP | ENSG00000081051 | QDGEKIMSY | 1799 | HLA-C*12:03 |
| 2813 | AFP | ENSG00000081051 | QDTLSNKI | 1800 | HLA-B*13:02 |
| 2814 | AFP | ENSG00000081051 | QDTLSNKI | 1800 | HLA-B*37:01 |
| 2815 | AFP | ENSG00000081051 | QDTLSNKI | 1800 | HLA-B*49:01 |
| 2816 | AFP | ENSG00000081051 | QDTLSNKI | 1800 | HLA-C*16:02 |
| 2817 | AFP | ENSG00000081051 | QEATYKEV | 1801 | HLA-B*49:01 |
| 2818 | AFP | ENSG00000081051 | QEFLINLV | 1802 | HLA-A*30:01 |
| 2819 | AFP | ENSG00000081051 | QEFLINLV | 1802 | HLA-B*18:01 |
| 2820 | AFP | ENSG00000081051 | QEFLINLV | 1802 | HLA-B*37:01 |
| 2821 | AFP | ENSG00000081051 | QEFLINLV | 1802 | HLA-B*49:01 |
| 2822 | AFP | ENSG00000081051 | QESQALAKR | 1803 | HLA-B*44:02 |
| 2823 | AFP | ENSG00000081051 | QESQALAKR | 1803 | HLA-B*44:03 |
| 2824 | AFP | ENSG00000081051 | QESQALAKR | 1803 | HLA-C*16:04 |
| 2825 | AFP | ENSG00000081051 | QFVQEATY | 1804 | HLA-C*14:02 |
| 2826 | AFP | ENSG00000081051 | QGVALQTMK | 1805 | HLA-B*27:02 |
| 2827 | AFP | ENSG00000081051 | QGVALQTM | 1806 | HLA-B*51:01 |
| 2828 | AFP | ENSG00000081051 | QHACAVMKNF | 1807 | HLA-B*38:01 |
| 2829 | AFP | ENSG00000081051 | QKFTKVNF | 1808 | HLA-B*15:03 |
| 2830 | AFP | ENSG00000081051 | QKYIQESQAL | 1809 | HLA-B*15:03 |
| 2831 | AFP | ENSG00000081051 | QLAVSVILRV | 1810 | HLA-A*02:03 |
| 2832 | AFP | ENSG00000081051 | QLAVSVILR | 1811 | HLA-A*68:01 |
| 2833 | AFP | ENSG00000081051 | QLAVSVILR | 1811 | HLA-C*07:06 |
| 2834 | AFP | ENSG00000081051 | QLPAFLEEL | 1812 | HLA-A*02:01 |
| 2835 | AFP | ENSG00000081051 | QLPAFLEEL | 1812 | HLA-A*02:03 |
| 2836 | AFP | ENSG00000081051 | QLPAFLEEL | 1812 | HLA-A*02:04 |
| 2837 | AFP | ENSG00000081051 | QLPAFLEEL | 1812 | HLA-A*02:07 |
| 2838 | AFP | ENSG00000081051 | QLPAFLEEL | 1812 | HLA-A*24:02 |
| 2839 | AFP | ENSG00000081051 | QLPAFLEEL | 1812 | HLA-C*01:02 |
| 2840 | AFP | ENSG00000081051 | QLSEDKLLAC | 1813 | HLA-A*02:01 |
| 2841 | AFP | ENSG00000081051 | QLSEDKLLA | 1814 | HLA-A*02:01 |
| 2842 | AFP | ENSG00000081051 | QLSEDKLLA | 1814 | HLA-B*13:02 |
| 2843 | AFP | ENSG00000081051 | QNAFLVAYTK | 1815 | HLA-B*27:02 |
| 2844 | AFP | ENSG00000081051 | QQDTLSNKI | 1816 | HLA-B*13:02 |
| 2845 | AFP | ENSG00000081051 | QQDTLSNKI | 1816 | HLA-B*38:01 |
| 2846 | AFP | ENSG00000081051 | QQDTLSNKI | 1816 | HLA-B*39:01 |
| 2847 | AFP | ENSG00000081051 | QQDTLSNKI | 1816 | HLA-C*05:01 |
| 2848 | AFP | ENSG00000081051 | QQDTLSNKI | 1816 | HLA-C*06:02 |
| 2849 | AFP | ENSG00000081051 | QTKAATVTK | 1817 | HLA-A*03:01 |
| 2850 | AFP | ENSG00000081051 | QTKAATVTK | 1817 | HLA-A*03:02 |
| 2851 | AFP | ENSG00000081051 | QTKAATVTK | 1817 | HLA-A*11:01 |
| 2852 | AFP | ENSG00000081051 | QTKAATVTK | 1817 | HLA-A*31:01 |
| 2853 | AFP | ENSG00000081051 | QTKAATVTK | 1817 | HLA-A*33:01 |
| 2854 | AFP | ENSG00000081051 | QTKAATVTK | 1817 | HLA-A*33:03 |
| 2855 | AFP | ENSG00000081051 | QTKAATVTK | 1817 | HLA-A*68:01 |
| 2856 | AFP | ENSG00000081051 | QTKAATVTK | 1817 | HLA-C*07:06 |
| 2857 | AFP | ENSG00000081051 | QTMKQEFLINL | 1818 | HLA-A*31:01 |
| 2858 | AFP | ENSG00000081051 | QVPEPVTSC | 1819 | HLA-A*02:07 |
| 2859 | AFP | ENSG00000081051 | QVPEPVTSC | 1819 | HLA-A*25:01 |
| 2860 | AFP | ENSG00000081051 | QVPEPVTSC | 1819 | HLA-C*01:02 |
| 2861 | AFP | ENSG00000081051 | RETFMNKF | 1820 | HLA-B*37:01 |
| 2862 | AFP | ENSG00000081051 | RFLGDRDFNQF | 1821 | HLA-A*24:02 |
| 2863 | AFP | ENSG00000081051 | RTFQAITVTKL | 1822 | HLA-A*03:01 |
| 2864 | AFP | ENSG00000081051 | RTFQAITVTKL | 1822 | HLA-B*57:01 |
| 2865 | AFP | ENSG00000081051 | RTFQAITVTK | 1823 | HLA-A*03:01 |
| 2866 | AFP | ENSG00000081051 | RTFQAITVTK | 1823 | HLA-A*03:02 |
| 2867 | AFP | ENSG00000081051 | RTFQAITVTK | 1823 | HLA-A*11:01 |
| 2868 | AFP | ENSG00000081051 | RTFQAITVTK | 1823 | HLA-A*31:01 |
| 2869 | AFP | ENSG00000081051 | RTFQAITVTK | 1823 | HLA-B*27:02 |
| 2870 | AFP | ENSG00000081051 | RTFQAITVTK | 1823 | HLA-B*57:01 |
| 2871 | AFP | ENSG00000081051 | SEEGRHNCF | 1824 | HLA-B*37:01 |
| 2872 | AFP | ENSG00000081051 | SELMAITRKM | 1825 | HLA-B*44:02 |
| 2873 | AFP | ENSG00000081051 | SELMAITRKM | 1825 | HLA-B*44:03 |
| 2874 | AFP | ENSG00000081051 | SELMAITR | 1826 | HLA-B*18:01 |
| 2875 | AFP | ENSG00000081051 | SIFLIFLL | 1827 | HLA-A*02:04 |
| 2876 | AFP | ENSG00000081051 | SKMVKDAL | 1828 | HLA-B*08:01 |
| 2877 | AFP | ENSG00000081051 | SLADLATIFFA | 1829 | HLA-A*02:01 |
| 2878 | AFP | ENSG00000081051 | SLADLATIFFA | 1829 | HLA-A*02:04 |
| 2879 | AFP | ENSG00000081051 | SLADLATIFF | 1830 | HLA-A*02:01 |
| 2880 | AFP | ENSG00000081051 | SLADLATIFF | 1830 | HLA-A*02:04 |
| 2881 | AFP | ENSG00000081051 | SLADLATIF | 1831 | HLA-A*23:01 |
| 2882 | AFP | ENSG00000081051 | SLADLATIF | 1831 | HLA-A*24:02 |
| 2883 | AFP | ENSG00000081051 | SLADLATIF | 1831 | HLA-A*25:01 |
| 2884 | AFP | ENSG00000081051 | SLADLATIF | 1831 | HLA-A*26:01 |
| 2885 | AFP | ENSG00000081051 | SLADLATIF | 1831 | HLA-A*29:02 |
| 2886 | AFP | ENSG00000081051 | SLADLATIF | 1831 | HLA-A*32:01 |
| 2887 | AFP | ENSG00000081051 | SLADLATIF | 1831 | HLA-B*15:01 |
| 2888 | AFP | ENSG00000081051 | SLADLATIF | 1831 | HLA-B*15:03 |
| 2889 | AFP | ENSG00000081051 | SLADLATIF | 1831 | HLA-B*35:01 |
| 2890 | AFP | ENSG00000081051 | SLADLATIF | 1831 | HLA-B*44:02 |
| 2891 | AFP | ENSG00000081051 | SLADLATIF | 1831 | HLA-B*44:03 |
| 2892 | AFP | ENSG00000081051 | SLADLATIF | 1831 | HLA-B*46:01 |
| 2893 | AFP | ENSG00000081051 | SLADLATIF | 1831 | HLA-C*02:02 |
| 2894 | AFP | ENSG00000081051 | SLADLATIF | 1831 | HLA-C*07:04 |
| 2895 | AFP | ENSG00000081051 | SLADLATIF | 1831 | HLA-C*12:03 |
| 2896 | AFP | ENSG00000081051 | SLADLATI | 1832 | HLA-A*02:01 |
| 2897 | AFP | ENSG00000081051 | SLLNQHACAV | 1833 | HLA-A*02:01 |
| 2898 | AFP | ENSG00000081051 | SLLNQHACAV | 1833 | HLA-A*02:03 |
| 2899 | AFP | ENSG00000081051 | SLVVDETYV | 1834 | HLA-A*02:01 |
| 2900 | AFP | ENSG00000081051 | SLVVDETY | 1835 | HLA-B*15:01 |
| 2901 | AFP | ENSG00000081051 | SLVVDETY | 1835 | HLA-B*15:03 |
| 2902 | AFP | ENSG00000081051 | SPNLNRFL | 1836 | HLA-B*07:02 |
| 2903 | AFP | ENSG00000081051 | SQKFTKVNF | 1837 | HLA-A*32:01 |
| 2904 | AFP | ENSG00000081051 | SQKFTKVNF | 1837 | HLA-B*15:01 |
| 2905 | AFP | ENSG00000081051 | SQKFTKVNF | 1837 | HLA-B*15:03 |
| 2906 | AFP | ENSG00000081051 | SQKFTKVNF | 1837 | HLA-C*07:04 |
| 2907 | AFP | ENSG00000081051 | SQQDTLSNKI | 1838 | HLA-B*13:02 |
| 2908 | AFP | ENSG00000081051 | SQQDTLSNKI | 1838 | HLA-B*38:01 |
| 2909 | AFP | ENSG00000081051 | SQQDTLSNK | 1839 | HLA-A*03:02 |
| 2910 | AFP | ENSG00000081051 | SQQDTLSNK | 1839 | HLA-A*11:01 |
| 2911 | AFP | ENSG00000081051 | SSELMAITRK | 1840 | HLA-A*11:01 |
| 2912 | AFP | ENSG00000081051 | SSELMAITR | 1841 | HLA-A*11:01 |
| 2913 | AFP | ENSG00000081051 | SSELMAITR | 1841 | HLA-A*68:01 |
| 2914 | AFP | ENSG00000081051 | SSELMAITR | 1841 | HLA-C*07:06 |
| 2915 | AFP | ENSG00000081051 | SSGEKNIF | 1842 | HLA-C*16:01 |
| 2916 | AFP | ENSG00000081051 | SSLVVDETY | 1843 | HLA-A*01:01 |
| 2917 | AFP | ENSG00000081051 | SSLVVDETY | 1843 | HLA-A*30:02 |
| 2918 | AFP | ENSG00000081051 | SSLVVDETY | 1843 | HLA-B*15:01 |
| 2919 | AFP | ENSG00000081051 | SSLVVDETY | 1843 | HLA-B*15:03 |
| 2920 | AFP | ENSG00000081051 | SSLVVDETY | 1843 | HLA-B*35:01 |
| 2921 | AFP | ENSG00000081051 | SSLVVDETY | 1843 | HLA-B*46:01 |
| 2922 | AFP | ENSG00000081051 | SSLVVDETY | 1843 | HLA-B*57:01 |
| 2923 | AFP | ENSG00000081051 | SSLVVDETY | 1843 | HLA-B*58:01 |
| 2924 | AFP | ENSG00000081051 | SSLVVDETY | 1843 | HLA-C*01:02 |
| 2925 | AFP | ENSG00000081051 | SSLVVDETY | 1843 | HLA-C*16:04 |
| 2926 | AFP | ENSG00000081051 | SYANRRPCF | 1844 | HLA-A*24:02 |
| 2927 | AFP | ENSG00000081051 | SYICSQQDTL | 1845 | HLA-A*23:01 |
| 2928 | AFP | ENSG00000081051 | SYICSQQDTL | 1845 | HLA-A*24:02 |
| 2929 | AFP | ENSG00000081051 | SYICSQQDTL | 1845 | HLA-C*14:02 |
| 2930 | AFP | ENSG00000081051 | SYQCTAEISL | 1846 | HLA-C*14:02 |
| 2931 | AFP | ENSG00000081051 | SYQCTAEI | 1847 | HLA-C*14:02 |
| 2932 | AFP | ENSG00000081051 | TAEISLADL | 1848 | HLA-C*05:01 |
| 2933 | AFP | ENSG00000081051 | TECCKLTTL | 1849 | HLA-B*40:02 |
| 2934 | AFP | ENSG00000081051 | TEEQLEAVI | 1850 | HLA-B*40:01 |
| 2935 | AFP | ENSG00000081051 | TEEQLEAVI | 1850 | HLA-B*49:01 |
| 2936 | AFP | ENSG00000081051 | TEIQKLVLDV | 1851 | HLA-B*49:01 |
| 2937 | AFP | ENSG00000081051 | TEIQKLVL | 1852 | HLA-A*30:01 |
| 2938 | AFP | ENSG00000081051 | TEIQKLVL | 1852 | HLA-B*08:01 |
| 2939 | AFP | ENSG00000081051 | TEIQKLVL | 1852 | HLA-B*18:01 |
| 2940 | AFP | ENSG00000081051 | TEIQKLVL | 1852 | HLA-B*37:01 |
| 2941 | AFP | ENSG00000081051 | TEIQKLVL | 1852 | HLA-B*40:01 |
| 2942 | AFP | ENSG00000081051 | TEIQKLVL | 1852 | HLA-B*40:02 |
| 2943 | AFP | ENSG00000081051 | TEIQKLVL | 1852 | HLA-B*49:01 |
| 2944 | AFP | ENSG00000081051 | TENPLECQDK | 1853 | HLA-B*27:02 |
| 2945 | AFP | ENSG00000081051 | TFQAITVTKL | 1854 | HLA-A*23:01 |
| 2946 | AFP | ENSG00000081051 | TFQAITVTKL | 1854 | HLA-A*33:03 |
| 2947 | AFP | ENSG00000081051 | TFQAITVTKL | 1854 | HLA-C*14:02 |
| 2948 | AFP | ENSG00000081051 | TFQAITVTK | 1855 | HLA-A*03:02 |
| 2949 | AFP | ENSG00000081051 | TFQAITVTK | 1855 | HLA-A*23:01 |
| 2950 | AFP | ENSG00000081051 | TFQAITVTK | 1855 | HLA-A*33:01 |
| 2951 | AFP | ENSG00000081051 | TFQAITVTK | 1855 | HLA-A*33:03 |
| 2952 | AFP | ENSG00000081051 | TFQAITVTK | 1855 | HLA-C*14:02 |
| 2953 | AFP | ENSG00000081051 | TGDEQSSGCL | 1856 | HLA-C*05:01 |
| 2954 | AFP | ENSG00000081051 | TILLWAARY | 1857 | HLA-A*29:02 |
| 2955 | AFP | ENSG00000081051 | TLSNKITEC | 1858 | HLA-A*02:01 |
| 2956 | AFP | ENSG00000081051 | TLSNKITEC | 1858 | HLA-A*02:03 |
| 2957 | AFP | ENSG00000081051 | TLSNKITEC | 1858 | HLA-A*02:04 |
| 2958 | AFP | ENSG00000081051 | TLSNKITEC | 1858 | HLA-B*55:01 |
| 2959 | AFP | ENSG00000081051 | TMKQEFLINL | 1859 | HLA-A*02:03 |
| 2960 | AFP | ENSG00000081051 | TPASIPLFQV | 1860 | HLA-B*56:01 |
| 2961 | AFP | ENSG00000081051 | TPVNPGVGQC | 1861 | HLA-B*56:01 |
| 2962 | AFP | ENSG00000081051 | TPVNPGVGQ | 1862 | HLA-B*35:01 |
| 2963 | AFP | ENSG00000081051 | TPVNPGVGQ | 1862 | HLA-B*56:01 |
| 2964 | AFP | ENSG00000081051 | TRTFQAITVTK | 1863 | HLA-B*27:05 |
| 2965 | AFP | ENSG00000081051 | TRTFQAITV | 1864 | HLA-B*27:05 |
| 2966 | AFP | ENSG00000081051 | TRTFQAITV | 1864 | HLA-C*06:02 |
| 2967 | AFP | ENSG00000081051 | TSSELMAITRK | 1865 | HLA-A*11:01 |
| 2968 | AFP | ENSG00000081051 | TSSELMAITR | 1866 | HLA-A*11:01 |
| 2969 | AFP | ENSG00000081051 | TSSELMAITR | 1866 | HLA-A*31:01 |
| 2970 | AFP | ENSG00000081051 | TSSELMAITR | 1866 | HLA-A*33:01 |
| 2971 | AFP | ENSG00000081051 | TSSELMAITR | 1866 | HLA-A*33:03 |
| 2972 | AFP | ENSG00000081051 | TSSELMAITR | 1866 | HLA-A*68:01 |
| 2973 | AFP | ENSG00000081051 | TSSELMAITR | 1866 | HLA-A*68:02 |
| 2974 | AFP | ENSG00000081051 | TSSELMAITR | 1866 | HLA-B*27:02 |
| 2975 | AFP | ENSG00000081051 | TSSELMAITR | 1866 | HLA-B*57:01 |
| 2976 | AFP | ENSG00000081051 | TSSELMAITR | 1866 | HLA-C*07:06 |
| 2977 | AFP | ENSG00000081051 | TVTKLSQKF | 1867 | HLA-A*25:01 |
| 2978 | AFP | ENSG00000081051 | TVTKLSQKF | 1867 | HLA-A*26:01 |
| 2979 | AFP | ENSG00000081051 | TVTKLSQKF | 1867 | HLA-A*32:01 |
| 2980 | AFP | ENSG00000081051 | TVTKLSQKF | 1867 | HLA-B*35:01 |
| 2981 | AFP | ENSG00000081051 | TVTKLSQKF | 1867 | HLA-B*44:03 |
| 2982 | AFP | ENSG00000081051 | TVTKLSQKF | 1867 | HLA-B*58:01 |
| 2983 | AFP | ENSG00000081051 | TVTKLSQK | 1868 | HLA-A*03:02 |
| 2984 | AFP | ENSG00000081051 | TYKEVSKMVK | 1869 | HLA-A*31:01 |
| 2985 | AFP | ENSG00000081051 | TYKEVSKMVK | 1869 | HLA-A*33:01 |
| 2986 | AFP | ENSG00000081051 | TYKEVSKMVK | 1869 | HLA-A*33:03 |
| 2987 | AFP | ENSG00000081051 | TYKEVSKMVK | 1869 | HLA-C*04:01 |
| 2988 | AFP | ENSG00000081051 | TYKEVSKMVK | 1869 | HLA-C*06:02 |
| 2989 | AFP | ENSG00000081051 | TYKEVSKMV | 1870 | HLA-A*24:02 |
| 2990 | AFP | ENSG00000081051 | TYKEVSKMV | 1870 | HLA-C*06:02 |
| 2991 | AFP | ENSG00000081051 | TYKEVSKMV | 1870 | HLA-C*16:02 |
| 2992 | AFP | ENSG00000081051 | TYKEVSKM | 1871 | HLA-B*08:01 |
| 2993 | AFP | ENSG00000081051 | TYKEVSKM | 1871 | HLA-C*14:02 |
| 2994 | AFP | ENSG00000081051 | VAKGYQELL | 1872 | HLA-A*23:01 |
| 2995 | AFP | ENSG00000081051 | VAKGYQELL | 1872 | HLA-B*46:01 |
| 2996 | AFP | ENSG00000081051 | VAKGYQELL | 1872 | HLA-C*02:02 |
| 2997 | AFP | ENSG00000081051 | VAKGYQELL | 1872 | HLA-C*07:04 |
| 2998 | AFP | ENSG00000081051 | VAKGYQELL | 1872 | HLA-C*12:03 |
| 2999 | AFP | ENSG00000081051 | VAKGYQELL | 1872 | HLA-C*16:02 |
| 3000 | AFP | ENSG00000081051 | VAKGYQEL | 1873 | HLA-B*08:01 |
| 3001 | AFP | ENSG00000081051 | VAKGYQEL | 1873 | HLA-B*46:01 |
| 3002 | AFP | ENSG00000081051 | VAKGYQEL | 1873 | HLA-C*03:04 |
| 3003 | AFP | ENSG00000081051 | VAKGYQEL | 1873 | HLA-C*16:01 |
| 3004 | AFP | ENSG00000081051 | VECFQTKAATV | 1874 | HLA-B*49:01 |
| 3005 | AFP | ENSG00000081051 | VESIFLIF | 1875 | HLA-B*18:01 |
| 3006 | AFP | ENSG00000081051 | VESIFLIF | 1875 | HLA-B*37:01 |
| 3007 | AFP | ENSG00000081051 | VGQCCTSSY | 1876 | HLA-B*46:01 |
| 3008 | AFP | ENSG00000081051 | VGQCCTSSY | 1876 | HLA-C*14:02 |
| 3009 | AFP | ENSG00000081051 | VIADFSGLLEK | 1877 | HLA-A*03:01 |
| 3010 | AFP | ENSG00000081051 | VIADFSGLLEK | 1877 | HLA-A*03:02 |
| 3011 | AFP | ENSG00000081051 | VIADFSGLLEK | 1877 | HLA-A*11:01 |
| 3012 | AFP | ENSG00000081051 | VIADFSGLLEK | 1877 | HLA-A*31:01 |
| 3013 | AFP | ENSG00000081051 | VIADFSGLLEK | 1877 | HLA-A*33:01 |
| 3014 | AFP | ENSG00000081051 | VIADFSGLLEK | 1877 | HLA-B*27:02 |
| 3015 | AFP | ENSG00000081051 | VIADFSGLL | 1878 | HLA-A*02:03 |
| 3016 | AFP | ENSG00000081051 | VIADFSGLL | 1878 | HLA-A*03:01 |
| 3017 | AFP | ENSG00000081051 | VIADFSGLL | 1878 | HLA-A*23:01 |
| 3018 | AFP | ENSG00000081051 | VIADFSGLL | 1878 | HLA-A*24:02 |
| 3019 | AFP | ENSG00000081051 | VIADFSGLL | 1878 | HLA-A*26:01 |
| 3020 | AFP | ENSG00000081051 | VIADFSGLL | 1878 | HLA-A*68:02 |
| 3021 | AFP | ENSG00000081051 | VIADFSGLL | 1878 | HLA-B*13:02 |
| 3022 | AFP | ENSG00000081051 | VIADFSGLL | 1878 | HLA-B*27:05 |
| 3023 | AFP | ENSG00000081051 | VIADFSGLL | 1878 | HLA-C*03:03 |
| 3024 | AFP | ENSG00000081051 | VIADFSGLL | 1878 | HLA-C*03:04 |
| 3025 | AFP | ENSG00000081051 | VIADFSGLL | 1878 | HLA-C*07:04 |
| 3026 | AFP | ENSG00000081051 | VIADFSGL | 1879 | HLA-C*01:02 |
| 3027 | AFP | ENSG00000081051 | VIADFSGL | 1879 | HLA-C*05:01 |
| 3028 | AFP | ENSG00000081051 | VILRVAKGY | 1880 | HLA-A*29:02 |
| 3029 | AFP | ENSG00000081051 | VLDVAHVHEH | 1881 | HLA-A*01:01 |
| 3030 | AFP | ENSG00000081051 | VLDVAHVH | 1882 | HLA-C*04:01 |
| 3031 | AFP | ENSG00000081051 | VMKNFGTRTF | 1883 | HLA-A*24:02 |
| 3032 | AFP | ENSG00000081051 | VMKNFGTRTF | 1883 | HLA-A*32:01 |
| 3033 | AFP | ENSG00000081051 | VMKNFGTRTF | 1883 | HLA-B*46:01 |
| 3034 | AFP | ENSG00000081051 | VMKNFGTRTF | 1883 | HLA-B*57:01 |
| 3035 | AFP | ENSG00000081051 | VMKNFGTR | 1884 | HLA-A*31:01 |
| 3036 | AFP | ENSG00000081051 | VMKNFGTR | 1884 | HLA-A*33:01 |
| 3037 | AFP | ENSG00000081051 | VNFTEIQKL | 1885 | HLA-A*02:04 |
| 3038 | AFP | ENSG00000081051 | VNFTEIQKL | 1885 | HLA-A*23:01 |
| 3039 | AFP | ENSG00000081051 | VNFTEIQKL | 1885 | HLA-C*12:03 |
| 3040 | AFP | ENSG00000081051 | VPEPVTSCEAY | 1886 | HLA-A*01:01 |
| 3041 | AFP | ENSG00000081051 | VPEPVTSCEAY | 1886 | HLA-B*35:01 |
| 3042 | AFP | ENSG00000081051 | VPEPVTSCEAY | 1886 | HLA-B*55:01 |
| 3043 | AFP | ENSG00000081051 | VPEPVTSCEA | 1887 | HLA-B*56:01 |
| 3044 | AFP | ENSG00000081051 | VPEPVTSC | 1888 | HLA-B*56:01 |
| 3045 | AFP | ENSG00000081051 | VQEATYKEVSK | 1889 | HLA-A*03:02 |
| 3046 | AFP | ENSG00000081051 | VQEATYKEV | 1890 | HLA-B*13:02 |
| 3047 | AFP | ENSG00000081051 | VQEATYKEV | 1890 | HLA-B*40:02 |
| 3048 | AFP | ENSG00000081051 | VQEATYKEV | 1890 | HLA-C*05:01 |
| 3049 | AFP | ENSG00000081051 | VQEATYKEV | 1890 | HLA-C*06:02 |
| 3050 | AFP | ENSG00000081051 | VQEATYKEV | 1890 | HLA-C*16:02 |
| 3051 | AFP | ENSG00000081051 | VSKMVKDAL | 1891 | HLA-C*01:02 |
| 3052 | AFP | ENSG00000081051 | VTKELRESSL | 1892 | HLA-B*08:01 |
| 3053 | AFP | ENSG00000081051 | VTKELRESSL | 1892 | HLA-C*01:02 |
| 3054 | AFP | ENSG00000081051 | VTKLSQKF | 1893 | HLA-A*23:01 |
| 3055 | AFP | ENSG00000081051 | VTKLSQKF | 1893 | HLA-B*57:01 |
| 3056 | AFP | ENSG00000081051 | VVDETYVPPAF | 1894 | HLA-A*02:07 |
| 3057 | AFP | ENSG00000081051 | VVDETYVPPAF | 1894 | HLA-B*27:02 |
| 3058 | AFP | ENSG00000081051 | VVDETYVPPAF | 1894 | HLA-B*38:01 |
| 3059 | AFP | ENSG00000081051 | VVDETYVPPAF | 1894 | HLA-C*05:01 |
| 3060 | AFP | ENSG00000081051 | VVDETYVPP | 1895 | HLA-C*05:01 |
| 3061 | AFP | ENSG00000081051 | YAPTILLW | 1896 | HLA-B*51:01 |
| 3062 | AFP | ENSG00000081051 | YEEDRETFM | 1897 | HLA-A*30:01 |
| 3063 | AFP | ENSG00000081051 | YEEDRETFM | 1897 | HLA-B*37:01 |
| 3064 | AFP | ENSG00000081051 | YEEDRETFM | 1897 | HLA-B*40:01 |
| 3065 | AFP | ENSG00000081051 | YEEDRETFM | 1897 | HLA-B*40:02 |
| 3066 | AFP | ENSG00000081051 | YEEDRETFM | 1897 | HLA-B*44:02 |
| 3067 | AFP | ENSG00000081051 | YEEDRETFM | 1897 | HLA-B*49:01 |
| 3068 | AFP | ENSG00000081051 | YEEDRETFM | 1897 | HLA-C*05:01 |
| 3069 | AFP | ENSG00000081051 | YEEDRETFM | 1897 | HLA-C*16:04 |
| 3070 | AFP | ENSG00000081051 | YEEDRETF | 1898 | HLA-B*18:01 |
| 3071 | AFP | ENSG00000081051 | YEEDRETF | 1898 | HLA-B*37:01 |
| 3072 | AFP | ENSG00000081051 | YGIASILDSY | 1899 | HLA-A*01:01 |
| 3073 | AFP | ENSG00000081051 | YGIASILDSY | 1899 | HLA-A*26:01 |
| 3074 | AFP | ENSG00000081051 | YGIASILDSY | 1899 | HLA-A*29:02 |
| 3075 | AFP | ENSG00000081051 | YGIASILDSY | 1899 | HLA-A*30:02 |
| 3076 | AFP | ENSG00000081051 | YGIASILDSY | 1899 | HLA-B*15:01 |
| 3077 | AFP | ENSG00000081051 | YGIASILDSY | 1899 | HLA-B*27:02 |
| 3078 | AFP | ENSG00000081051 | YGIASILDSY | 1899 | HLA-B*35:01 |
| 3079 | AFP | ENSG00000081051 | YGIASILDSY | 1899 | HLA-B*46:01 |
| 3080 | AFP | ENSG00000081051 | YGIASILDSY | 1899 | HLA-C*02:02 |
| 3081 | AFP | ENSG00000081051 | YGIASILDSY | 1899 | HLA-C*16:04 |
| 3082 | AFP | ENSG00000081051 | YICSQQDTL | 1900 | HLA-B*35:03 |
| 3083 | AFP | ENSG00000081051 | YICSQQDTL | 1900 | HLA-B*38:01 |
| 3084 | AFP | ENSG00000081051 | YICSQQDTL | 1900 | HLA-B*39:01 |
| 3085 | AFP | ENSG00000081051 | YICSQQDTL | 1900 | HLA-B*40:01 |
| 3086 | AFP | ENSG00000081051 | YICSQQDTL | 1900 | HLA-C*02:02 |
| 3087 | AFP | ENSG00000081051 | YICSQQDTL | 1900 | HLA-C*03:03 |
| 3088 | AFP | ENSG00000081051 | YICSQQDTL | 1900 | HLA-C*03:04 |
| 3089 | AFP | ENSG00000081051 | YICSQQDTL | 1900 | HLA-C*07:04 |
| 3090 | AFP | ENSG00000081051 | YIQESQALAKR | 1901 | HLA-A*03:02 |
| 3091 | AFP | ENSG00000081051 | YIQESQALAKR | 1901 | HLA-A*11:01 |
| 3092 | AFP | ENSG00000081051 | YIQESQALAKR | 1901 | HLA-A*31:01 |
| 3093 | AFP | ENSG00000081051 | YIQESQALAKR | 1901 | HLA-A*33:01 |
| 3094 | AFP | ENSG00000081051 | YIQESQALAKR | 1901 | HLA-A*33:03 |
| 3095 | AFP | ENSG00000081051 | YIQESQALAKR | 1901 | HLA-A*68:01 |
| 3096 | AFP | ENSG00000081051 | YIQESQALAKR | 1901 | HLA-B*27:02 |
| 3097 | AFP | ENSG00000081051 | YIQESQALAKR | 1901 | HLA-C*07:06 |
| 3098 | AFP | ENSG00000081051 | YIQESQALAK | 1902 | HLA-A*01:01 |
| 3099 | AFP | ENSG00000081051 | YIQESQALAK | 1902 | HLA-A*03:01 |
| 3100 | AFP | ENSG00000081051 | YIQESQALAK | 1902 | HLA-A*03:02 |
| 3101 | AFP | ENSG00000081051 | YIQESQALAK | 1902 | HLA-A*11:01 |
| 3102 | AFP | ENSG00000081051 | YIQESQALAK | 1902 | HLA-A*68:01 |
| 3103 | AFP | ENSG00000081051 | YIQESQALAK | 1902 | HLA-B*27:02 |
| 3104 | AFP | ENSG00000081051 | YIQESQALAK | 1902 | HLA-C*07:06 |
| 3105 | AFP | ENSG00000081051 | YIQESQALA | 1903 | HLA-A*02:01 |
| 3106 | AFP | ENSG00000081051 | YIQESQAL | 1904 | HLA-A*30:01 |
| 3107 | AFP | ENSG00000081051 | YIQESQAL | 1904 | HLA-B*08:01 |
| 3108 | AFP | ENSG00000081051 | YIQESQAL | 1904 | HLA-B*15:01 |
| 3109 | AFP | ENSG00000081051 | YIQESQAL | 1904 | HLA-B*27:05 |
| 3110 | AFP | ENSG00000081051 | YIQESQAL | 1904 | HLA-B*35:03 |
| 3111 | AFP | ENSG00000081051 | YIQESQAL | 1904 | HLA-B*37:01 |
| 3112 | AFP | ENSG00000081051 | YIQESQAL | 1904 | HLA-B*39:01 |
| 3113 | AFP | ENSG00000081051 | YIQESQAL | 1904 | HLA-B*40:01 |
| 3114 | AFP | ENSG00000081051 | YIQESQAL | 1904 | HLA-B*40:02 |
| 3115 | AFP | ENSG00000081051 | YIQESQAL | 1904 | HLA-B*46:01 |
| 3116 | AFP | ENSG00000081051 | YIQESQAL | 1904 | HLA-C*01:02 |
| 3117 | AFP | ENSG00000081051 | YIQESQAL | 1904 | HLA-C*03:03 |
| 3118 | AFP | ENSG00000081051 | YIQESQAL | 1904 | HLA-C*03:04 |
| 3119 | AFP | ENSG00000081051 | YIQESQAL | 1904 | HLA-C*05:01 |
| 3120 | AFP | ENSG00000081051 | YIQESQAL | 1904 | HLA-C*07:04 |
| 3121 | AFP | ENSG00000081051 | YIQESQAL | 1904 | HLA-C*14:02 |
| 3122 | AFP | ENSG00000081051 | YIQESQAL | 1904 | HLA-C*16:01 |
| 3123 | AFP | ENSG00000081051 | YIQESQAL | 1904 | HLA-C*16:02 |
| 3124 | AFP | ENSG00000081051 | YLQNAFLVAY | 1905 | HLA-A*01:01 |
| 3125 | AFP | ENSG00000081051 | YLQNAFLVAY | 1905 | HLA-A*29:02 |
| 3126 | AFP | ENSG00000081051 | YLQNAFLVAY | 1905 | HLA-A*30:02 |
| 3127 | AFP | ENSG00000081051 | YLQNAFLVAY | 1905 | HLA-B*15:01 |
| 3128 | AFP | ENSG00000081051 | YLQNAFLVAY | 1905 | HLA-B*46:01 |
| 3129 | AFP | ENSG00000081051 | YLQNAFLVA | 1906 | HLA-A*02:01 |
| 3130 | AFP | ENSG00000081051 | YLQNAFLVA | 1906 | HLA-A*02:04 |
| 3131 | AFP | ENSG00000081051 | YLQNAFLVA | 1906 | HLA-B*54:01 |
| 3132 | AFP | ENSG00000081051 | YLQNAFLV | 1907 | HLA-A*02:04 |
| 3133 | AFP | ENSG00000081051 | YLQNAFLV | 1907 | HLA-B*13:02 |
| 3134 | AFP | ENSG00000081051 | YQCTAEISL | 1908 | HLA-B*13:02 |
| 3135 | AFP | ENSG00000081051 | YQCTAEISL | 1908 | HLA-B*27:05 |
| 3136 | AFP | ENSG00000081051 | YQCTAEISL | 1908 | HLA-B*38:01 |
| 3137 | AFP | ENSG00000081051 | YQCTAEISL | 1908 | HLA-B*39:01 |
| 3138 | AFP | ENSG00000081051 | YQCTAEISL | 1908 | HLA-B*40:01 |
| 3139 | AFP | ENSG00000081051 | YQCTAEISL | 1908 | HLA-C*03:03 |
| 3140 | AFP | ENSG00000081051 | YQCTAEISL | 1908 | HLA-C*07:04 |
| 3141 | AFP | ENSG00000081051 | YTKKAPQL | 1909 | HLA-B*07:02 |
| 3142 | AFP | ENSG00000081051 | YTKKAPQL | 1909 | HLA-B*08:01 |
| 3143 | AFP | ENSG00000081051 | YTKKAPQL | 1909 | HLA-B*40:02 |
| 3144 | AFP | ENSG00000081051 | YTKKAPQL | 1909 | HLA-B*51:01 |
| 3145 | AFP | ENSG00000081051 | YTKKAPQL | 1909 | HLA-B*58:01 |
| 3146 | AFP | ENSG00000081051 | YTKKAPQL | 1909 | HLA-C*03:03 |
| 3147 | AFP | ENSG00000081051 | YTKKAPQL | 1909 | HLA-C*03:04 |
| 3148 | AFP | ENSG00000081051 | YTKKAPQL | 1909 | HLA-C*06:02 |
| 3149 | AFP | ENSG00000081051 | YTKKAPQL | 1909 | HLA-C*07:01 |
| 3150 | AFP | ENSG00000081051 | YTKKAPQL | 1909 | HLA-C*12:03 |
| 3151 | AFP | ENSG00000081051 | YTKKAPQL | 1909 | HLA-C*16:01 |
| 3152 | AFP | ENSG00000081051 | YTKKAPQL | 1909 | HLA-C*16:02 |
| 3153 | AFP | ENSG00000081051 | YYLQNAFLVAY | 1910 | HLA-A*29:02 |
| 3154 | AFP | ENSG00000081051 | YYLQNAFLV | 1911 | HLA-A*23:01 |
| 3155 | AFP | ENSG00000081051 | YYLQNAFLV | 1911 | HLA-A*24:02 |
| 3156 | AFP | ENSG00000081051 | YYLQNAFLV | 1911 | HLA-A*29:02 |
| 3157 | AFP | ENSG00000081051 | YYLQNAFL | 1912 | HLA-A*23:01 |
| 3158 | MART1 | ENSG00000120215 | AAGIGILTV | 1913 | HLA-A*02:03 |
| 3159 | MART1 | ENSG00000120215 | AAGIGILTV | 1913 | HLA-B*13:02 |
| 3160 | MART1 | ENSG00000120215 | AAGIGILTV | 1913 | HLA-B*49:01 |
| 3161 | MART1 | ENSG00000120215 | AAGIGILTV | 1913 | HLA-B*51:01 |
| 3162 | MART1 | ENSG00000120215 | AAGIGILTV | 1913 | HLA-C*I2:03 |
| 3163 | MART1 | ENSG00000120215 | AEEAAGIGIL | 1914 | HLA-A*30:01 |
| 3164 | MART1 | ENSG00000120215 | AEEAAGIGIL | 1914 | HLA-B*40:01 |
| 3165 | MART1 | ENSG00000120215 | AEEAAGIGIL | 1914 | HLA-B*40:02 |
| 3166 | MART1 | ENSG00000120215 | AEEAAGIGIL | 1914 | HLA-B*44:02 |
| 3167 | MART1 | ENSG00000120215 | AEEAAGIGIL | 1914 | HLA-B*49:01 |
| 3168 | MART1 | ENSG00000120215 | AEEAAGIGI | 1915 | HLA-A*30:01 |
| 3169 | MART1 | ENSG00000120215 | AEEAAGIGI | 1915 | HLA-B*40:01 |
| 3170 | MART1 | ENSG00000120215 | AEEAAGIGI | 1915 | HLA-B*44:02 |
| 3171 | MART1 | ENSG00000120215 | AEEAAGIGI | 1915 | HLA-B*44:03 |
| 3172 | MART1 | ENSG00000120215 | AEEAAGIGI | 1915 | HLA-B*49:01 |
| 3173 | MART1 | ENSG00000120215 | AEQSPPPYSP | 1916 | HLA-B*27:05 |
| 3174 | MART1 | ENSG00000120215 | AEQSPPPYSP | 1916 | HLA-B*40:02 |
| 3175 | MART1 | ENSG00000120215 | AEQSPPPYSP | 1916 | HLA-B*44:02 |
| 3176 | MART1 | ENSG00000120215 | AEQSPPPY | 1917 | HLA-A*30:02 |
| 3177 | MART1 | ENSG00000120215 | AEQSPPPY | 1917 | HLA-B*I 8:01 |
| 3178 | MART1 | ENSG00000120215 | AEQSPPPY | 1917 | HLA-B*37:01 |
| 3179 | MART1 | ENSG00000120215 | AEQSPPPY | 1917 | HLA-B*44:03 |
| 3180 | MART1 | ENSG00000120215 | AGIGILTVI | 1918 | HLA-A*23:01 |
| 3181 | MART1 | ENSG00000120215 | AGIGILTVI | 1918 | HLA-B*13:02 |
| 3182 | MART1 | ENSG00000120215 | AGIGILTVI | 1918 | HLA-B*49:01 |
| 3183 | MART1 | ENSG00000120215 | AGIGILTVI | 1918 | HLA-C*02:02 |
| 3184 | MART1 | ENSG00000120215 | ALMDKSLHVG | 1919 | HLA-A*02:01 |
| 3185 | MART1 | ENSG00000120215 | ALMDKSLHV | 1920 | HLA-A*02:01 |
| 3186 | MART1 | ENSG00000120215 | ALMDKSLHV | 1920 | HLA-A*02:03 |
| 3187 | MART1 | ENSG00000120215 | ALMDKSLHV | 1920 | HLA-A*02:04 |
| 3188 | MART1 | ENSG00000120215 | ALMDKSLHV | 1920 | HLA-A*02:07 |
| 3189 | MART1 | ENSG00000120215 | ALMDKSLHV | 1920 | HLA-B*08:01 |
| 3190 | MART1 | ENSG00000120215 | ALMDKSLHV | 1920 | HLA-B*13:02 |
| 3191 | MART1 | ENSG00000120215 | ALMDKSLHV | 1920 | HLA-B*55:01 |
| 3192 | MART1 | ENSG00000120215 | APPAYEKLSA | 1921 | HLA-B*54:01 |
| 3193 | MART1 | ENSG00000120215 | APPAYEKLSA | 1921 | HLA-B*56:01 |
| 3194 | MART1 | ENSG00000120215 | CPQEGFDHR | 1922 | HLA-A*33:03 |
| 3195 | MART1 | ENSG00000120215 | DAHFIYGYPK | 1923 | HLA-A*33:01 |
| 3196 | MART1 | ENSG00000120215 | DAHFIYGY | 1924 | HLA-B*18:01 |
| 3197 | MART1 | ENSG00000120215 | DAHFIYGY | 1924 | HLA-B*35:01 |
| 3198 | MART1 | ENSG00000120215 | DAHFIYGY | 1924 | HLA-B*51:01 |
| 3199 | MART1 | ENSG00000120215 | DHRDSKVSL | 1925 | HLA-B*08:01 |
| 3200 | MART1 | ENSG00000120215 | DHRDSKVSL | 1925 | HLA-B*38:01 |
| 3201 | MART1 | ENSG00000120215 | DHRDSKVSL | 1925 | HLA-B*39:01 |
| 3202 | MART1 | ENSG00000120215 | DSKVSLQEK | 1926 | HLA-A*33:01 |
| 3203 | MART1 | ENSG00000120215 | DSKVSLQEK | 1926 | HLA-A*33:03 |
| 3204 | MART1 | ENSG00000120215 | DSKVSLQEK | 1926 | HLA-A*68:01 |
| 3205 | MART1 | ENSG00000120215 | DSKVSLQEK | 1926 | HLA-C*07:06 |
| 3206 | MART1 | ENSG00000120215 | EAAGIGILTVI | 1927 | HLA-A*25:01 |
| 3207 | MART1 | ENSG00000120215 | EAAGIGILTVI | 1927 | HLA-A*26:01 |
| 3208 | MART1 | ENSG00000120215 | EAAGIGILTVI | 1927 | HLA-A*68:01 |
| 3209 | MART1 | ENSG00000120215 | EAAGIGILTVI | 1927 | HLA-A*68:02 |
| 3210 | MART1 | ENSG00000120215 | EAAGIGILTV | 1928 | HLA-A*25:01 |
| 3211 | MART1 | ENSG00000120215 | EAAGIGILTV | 1928 | HLA-A*26:01 |
| 3212 | MART1 | ENSG00000120215 | EAAGIGILTV | 1928 | HLA-A*68:01 |
| 3213 | MART1 | ENSG00000120215 | EAAGIGILTV | 1928 | HLA-A*68:02 |
| 3214 | MART1 | ENSG00000120215 | EAAGIGILTV | 1928 | HLA-B*51:01 |
| 3215 | MART1 | ENSG00000120215 | EAAGIGILTV | 1928 | HLA-B*54:01 |
| 3216 | MART1 | ENSG00000120215 | EAAGIGILTV | 1928 | HLA-C*07:06 |
| 3217 | MART1 | ENSG00000120215 | EAAGIGILT | 1929 | HLA-A*33:03 |
| 3218 | MART1 | ENSG00000120215 | EAAGIGILT | 1929 | HLA-A*68:01 |
| 3219 | MART1 | ENSG00000120215 | EAAGIGILT | 1929 | HLA-A*68:02 |
| 3220 | MART1 | ENSG00000120215 | EAAGIGILT | 1929 | HLA-C*07:06 |
| 3221 | MART1 | ENSG00000120215 | EDAHFIYGY | 1930 | HLA-A*26:01 |
| 3222 | MART1 | ENSG00000120215 | EEAAGIGILTV | 1931 | HLA-A*30:01 |
| 3223 | MART1 | ENSG00000120215 | EEAAGIGILTV | 1931 | HLA-A*68:02 |
| 3224 | MART1 | ENSG00000120215 | EEAAGIGILTV | 1931 | HLA-B*44:02 |
| 3225 | MART1 | ENSG00000120215 | EEAAGIGILTV | 1931 | HLA-B*44:03 |
| 3226 | MART1 | ENSG00000120215 | EEAAGIGILTV | 1931 | HLA-B*49:01 |
| 3227 | MART1 | ENSG00000120215 | EEAAGIGIL | 1932 | HLA-A*30:01 |
| 3228 | MART1 | ENSG00000120215 | EEAAGIGIL | 1932 | HLA-B*38:01 |
| 3229 | MART1 | ENSG00000120215 | EEAAGIGIL | 1932 | HLA-B*40:01 |
| 3230 | MART1 | ENSG00000120215 | EEAAGIGIL | 1932 | HLA-B*44:02 |
| 3231 | MART1 | ENSG00000120215 | EEAAGIGIL | 1932 | HLA-B*44:03 |
| 3232 | MART1 | ENSG00000120215 | EEAAGIGI | 1933 | HLA-B*44:02 |
| 3233 | MART1 | ENSG00000120215 | EEAAGIGI | 1933 | HLA-B*44:03 |
| 3234 | MART1 | ENSG00000120215 | EEAAGIGI | 1933 | HLA-B*49:01 |
| 3235 | MART1 | ENSG00000120215 | EPVVPNAPPAY | 1934 | HLA-A*01:01 |
| 3236 | MART1 | ENSG00000120215 | EPVVPNAPPAY | 1934 | HLA-A*26:01 |
| 3237 | MART1 | ENSG00000120215 | EPVVPNAPPAY | 1934 | HLA-A*30:02 |
| 3238 | MART1 | ENSG00000120215 | EPVVPNAPPAY | 1934 | HLA-B*35:01 |
| 3239 | MART1 | ENSG00000120215 | EPVVPNAPPA | 1935 | HLA-B*54:01 |
| 3240 | MART1 | ENSG00000120215 | EQSPPPYSP | 1936 | HLA-B*13:02 |
| 3241 | MART1 | ENSG00000120215 | EQSPPPYSP | 1936 | HLA-B*27:05 |
| 3242 | MART1 | ENSG00000120215 | EQSPPPYSP | 1936 | HLA-B*38:01 |
| 3243 | MART1 | ENSG00000120215 | EQSPPPYSP | 1936 | HLA-B*39:01 |
| 3244 | MART1 | ENSG00000120215 | EQSPPPYSP | 1936 | HLA-B*40:02 |
| 3245 | MART1 | ENSG00000120215 | EQSPPPYSP | 1936 | HLA-C*06:02 |
| 3246 | MART1 | ENSG00000120215 | GILTVILGV | 1937 | HLA-A*02:01 |
| 3247 | MART1 | ENSG00000120215 | GILTVILGV | 1937 | HLA-A*02:03 |
| 3248 | MART1 | ENSG00000120215 | GILTVILGV | 1937 | HLA-A*02:04 |
| 3249 | MART1 | ENSG00000120215 | GILTVILGV | 1937 | HLA-A*02:07 |
| 3250 | MART1 | ENSG00000120215 | GILTVILGV | 1937 | HLA-B*13:02 |
| 3251 | MART1 | ENSG00000120215 | GTQCALTRR | 1938 | HLA-A*31:01 |
| 3252 | MART1 | ENSG00000120215 | HSYTTAEEA | 1939 | HLA-B*54:01 |
| 3253 | MART1 | ENSG00000120215 | HVGTQCALTR | 1940 | HLA-A*68:01 |
| 3254 | MART1 | ENSG00000120215 | HVGTQCALTR | 1940 | HLA-C*07:06 |
| 3255 | MART1 | ENSG00000120215 | HVGTQCAL | 1941 | HLA-B*08:01 |
| 3256 | MART1 | ENSG00000120215 | HVGTQCAL | 1941 | HLA-C*01:02 |
| 3257 | MART1 | ENSG00000120215 | HVGTQCAL | 1941 | HLA-C*07:04 |
| 3258 | MART1 | ENSG00000120215 | ILTVILGV | 1942 | HLA-B*13:02 |
| 3259 | MART1 | ENSG00000120215 | KLSAEQSPPPY | 1943 | HLA-A*03:02 |
| 3260 | MART1 | ENSG00000120215 | KLSAEQSPPPY | 1943 | HLA-A*30:02 |
| 3261 | MART1 | ENSG00000120215 | KSLHVGTQC | 1944 | HLA-B*58:01 |
| 3262 | MART1 | ENSG00000120215 | LHVGTQCAL | 1945 | HLA-B*38:01 |
| 3263 | MART1 | ENSG00000120215 | LHVGTQCAL | 1945 | HLA-B*39:01 |
| 3264 | MART1 | ENSG00000120215 | LSAEQSPPPY | 1946 | HLA-A*01:01 |
| 3265 | MART1 | ENSG00000120215 | LSAEQSPPPY | 1946 | HLA-A*26:01 |
| 3266 | MART1 | ENSG00000120215 | LSAEQSPPPY | 1946 | HLA-A*30:02 |
| 3267 | MART1 | ENSG00000120215 | MPREDAHFIY | 1947 | HLA-B*35:01 |
| 3268 | MART1 | ENSG00000120215 | MPREDAHFI | 1948 | HLA-B*51:01 |
| 3269 | MART1 | ENSG00000120215 | NAPPAYEKL | 1949 | HLA-A*02:07 |
| 3270 | MART1 | ENSG00000120215 | NAPPAYEKL | 1949 | HLA-B*35:03 |
| 3271 | MART1 | ENSG00000120215 | NAPPAYEKL | 1949 | HLA-B*51:01 |
| 3272 | MART1 | ENSG00000120215 | NAPPAYEKL | 1949 | HLA-C*01:02 |
| 3273 | MART1 | ENSG00000120215 | NAPPAYEKL | 1949 | HLA-C*05:01 |
| 3274 | MART1 | ENSG00000120215 | PVVPNAPPAY | 1950 | HLA-A*26:01 |
| 3275 | MART1 | ENSG00000120215 | PVVPNAPPAY | 1950 | HLA-A*30:02 |
| 3276 | MART1 | ENSG00000120215 | QEKNCEPVV | 1951 | HLA-B*40:02 |
| 3277 | MART1 | ENSG00000120215 | QEKNCEPVV | 1951 | HLA-B*49:01 |
| 3278 | MART1 | ENSG00000120215 | REDAHFIYGY | 1952 | HLA-B*44:02 |
| 3279 | MART1 | ENSG00000120215 | SAEQSPPPY | 1953 | HLA-A*01:01 |
| 3280 | MART1 | ENSG00000120215 | SAEQSPPPY | 1953 | HLA-A*30:02 |
| 3281 | MART1 | ENSG00000120215 | SAEQSPPPY | 1953 | HLA-A*32:01 |
| 3282 | MART1 | ENSG00000120215 | SAEQSPPPY | 1953 | HLA-B*15:03 |
| 3283 | MART1 | ENSG00000120215 | SAEQSPPPY | 1953 | HLA-B*35:01 |
| 3284 | MART1 | ENSG00000120215 | SAEQSPPPY | 1953 | HLA-B*35:03 |
| 3285 | MART1 | ENSG00000120215 | SAEQSPPPY | 1953 | HLA-B*39:01 |
| 3286 | MART1 | ENSG00000120215 | SAEQSPPPY | 1953 | HLA-B*46:01 |
| 3287 | MART1 | ENSG00000120215 | SAEQSPPPY | 1953 | HLA-B*55:01 |
| 3288 | MART1 | ENSG00000120215 | SAEQSPPPY | 1953 | HLA-B*58:01 |
| 3289 | MART1 | ENSG00000120215 | SAEQSPPPY | 1953 | HLA-C*01:02 |
| 3290 | MART1 | ENSG00000120215 | SAEQSPPPY | 1953 | HLA-C*02:02 |
| 3291 | MART1 | ENSG00000120215 | SAEQSPPPY | 1953 | HLA-C*03:03 |
| 3292 | MART1 | ENSG00000120215 | SAEQSPPPY | 1953 | HLA-C*03:04 |
| 3293 | MART1 | ENSG00000120215 | SAEQSPPPY | 1953 | HLA-C*04:01 |
| 3294 | MART1 | ENSG00000120215 | SAEQSPPPY | 1953 | HLA-C*05:01 |
| 3295 | MART1 | ENSG00000120215 | SAEQSPPPY | 1953 | HLA-C*07:04 |
| 3296 | MART1 | ENSG00000120215 | SAEQSPPPY | 1953 | HLA-C*07:06 |
| 3297 | MART1 | ENSG00000120215 | SAEQSPPPY | 1953 | HLA-C*12:03 |
| 3298 | MART1 | ENSG00000120215 | SAEQSPPPY | 1953 | HLA-C*16:02 |
| 3299 | MART1 | ENSG00000120215 | SYTTAEEAA | 1954 | HLA-C*14:02 |
| 3300 | MART1 | ENSG00000120215 | SYTTAEEA | 1955 | HLA-C*14:02 |
| 3301 | MART1 | ENSG00000120215 | TAEEAAGIGIL | 1956 | HLA-B*35:03 |
| 3302 | MART1 | ENSG00000120215 | TAEEAAGIGIL | 1956 | HLA-C*05:01 |
| 3303 | MART1 | ENSG00000120215 | TAEEAAGIGI | 1957 | HLA-C*05:01 |
| 3304 | MART1 | ENSG00000120215 | TAEEAAGI | 1958 | HLA-C*05:01 |
| 3305 | MART1 | ENSG00000120215 | TTAEEAAGIGI | 1959 | HLA-A*26:01 |
| 3306 | MART1 | ENSG00000120215 | TTAEEAAGIGI | 1959 | HLA-A*68:01 |
| 3307 | MART1 | ENSG00000120215 | TTAEEAAGIGI | 1959 | HLA-A*68:02 |
| 3308 | MART1 | ENSG00000120215 | VILGVLLLI | 1960 | HLA-A*02:04 |
| 3309 | MART1 | ENSG00000120215 | VILGVLLLI | 1960 | HLA-A*23:01 |
| 3310 | MART1 | ENSG00000120215 | VPNAPPAYEKL | 1961 | HLA-B*07:02 |
| 3311 | MART1 | ENSG00000120215 | VPNAPPAYEKL | 1961 | HLA-B*35:03 |
| 3312 | MART1 | ENSG00000120215 | VPNAPPAYEK | 1962 | HLA-C*07:06 |
| 3313 | MART1 | ENSG00000120215 | VPNAPPAY | 1963 | HLA-B*35:01 |
| 3314 | MART1 | ENSG00000120215 | VVPNAPPAYEK | 1964 | HLA-A*03:01 |
| 3315 | MART1 | ENSG00000120215 | VVPNAPPAYEK | 1964 | HLA-A*03:02 |
| 3316 | MART1 | ENSG00000120215 | VVPNAPPAYEK | 1964 | HLA-A*11:01 |
| 3317 | MART1 | ENSG00000120215 | VVPNAPPAY | 1965 | HLA-A*25:01 |
| 3318 | MART1 | ENSG00000120215 | VVPNAPPAY | 1965 | HLA-A*26:01 |
| 3319 | MART1 | ENSG00000120215 | VVPNAPPAY | 1965 | HLA-A*29:02 |
| 3320 | MART1 | ENSG00000120215 | VVPNAPPAY | 1965 | HLA-A*30:02 |
| 3321 | MART1 | ENSG00000120215 | VVPNAPPAY | 1965 | HLA-A*32:01 |
| 3322 | MART1 | ENSG00000120215 | VVPNAPPAY | 1965 | HLA-B*15:01 |
| 3323 | MART1 | ENSG00000120215 | VVPNAPPAY | 1965 | HLA-B*46:01 |
| 3324 | MART1 | ENSG00000120215 | VVPNAPPAY | 1965 | HLA-C*01:02 |
| 3325 | MART1 | ENSG00000120215 | VVPNAPPAY | 1965 | HLA-C*07:04 |
| 3326 | MART1 | ENSG00000120215 | YRALMDKSL | 1966 | HLA-B*27:05 |
| 3327 | MART1 | ENSG00000120215 | YRALMDKSL | 1966 | HLA-C*06:02 |
| 3328 | MART1 | ENSG00000120215 | YRALMDKSL | 1966 | HLA-C*07:02 |
| 3329 | MAGEA10 | ENSG00000124260 | ACSSPSVVASL | 1967 | HLA-A*30:01 |
| 3330 | MAGEA10 | ENSG00000124260 | AEILESVIRNY | 64 | HLA-A*30:01 |
| 3331 | MAGEA10 | ENSG00000124260 | AEILESVIRNY | 64 | HLA-A*30:02 |
| 3332 | MAGEA10 | ENSG00000124260 | AEILESVIRNY | 64 | HLA-B*27:02 |
| 3333 | MAGEA10 | ENSG00000124260 | AEILESVIRNY | 64 | HLA-B*44:02 |
| 3334 | MAGEA10 | ENSG00000124260 | AEILESVIRNY | 64 | HLA-B*44:03 |
| 3335 | MAGEA10 | ENSG00000124260 | AEILESVIRNY | 64 | HLA-B*57:01 |
| 3336 | MAGEA10 | ENSG00000124260 | AEILESVIRNY | 64 | HLA-C*16:04 |
| 3337 | MAGEA10 | ENSG00000124260 | AEILESVIRN | 1968 | HLA-B*44:02 |
| 3338 | MAGEA10 | ENSG00000124260 | AEILESVI | 1969 | HLA-A*30:01 |
| 3339 | MAGEA10 | ENSG00000124260 | AEILESVI | 1969 | HLA-B*40:01 |
| 3340 | MAGEA10 | ENSG00000124260 | AEILESVI | 1969 | HLA-B*44:02 |
| 3341 | MAGEA10 | ENSG00000124260 | AEILESVI | 1969 | HLA-B*44:03 |
| 3342 | MAGEA10 | ENSG00000124260 | AEILESVI | 1969 | HLA-B*49:01 |
| 3343 | MAGEA10 | ENSG00000124260 | AEIRKMSLL | 1970 | HLA-B*37:01 |
| 3344 | MAGEA10 | ENSG00000124260 | AEIRKMSLL | 1970 | HLA-B*40:01 |
| 3345 | MAGEA10 | ENSG00000124260 | AEIRKMSLL | 1970 | HLA-B*40:02 |
| 3346 | MAGEA10 | ENSG00000124260 | AEIRKMSLL | 1970 | HLA-B*44:02 |
| 3347 | MAGEA10 | ENSG00000124260 | AEIRKMSLL | 1970 | HLA-B*44:03 |
| 3348 | MAGEA10 | ENSG00000124260 | AEIRKMSLL | 1970 | HLA-B*49:01 |
| 3349 | MAGEA10 | ENSG00000124260 | AEIRKMSL | 1971 | HLA-B*37:01 |
| 3350 | MAGEA10 | ENSG00000124260 | AEIRKMSL | 1971 | HLA-B*40:02 |
| 3351 | MAGEA10 | ENSG00000124260 | AKVNGSDPRSF | 1972 | HLA-B*15:03 |
| 3352 | MAGEA10 | ENSG00000124260 | ALNMMGLY | 1973 | HLA-A*30:02 |
| 3353 | MAGEA10 | ENSG00000124260 | AMASASSSA | 1974 | HLA-A*02:03 |
| 3354 | MAGEA10 | ENSG00000124260 | AMASASSSA | 1974 | HLA-A*32:01 |
| 3355 | MAGEA10 | ENSG00000124260 | AMASASSSA | 1974 | HLA-B*55:01 |
| 3356 | MAGEA10 | ENSG00000124260 | AMASASSSA | 1974 | HLA-C*01:02 |
| 3357 | MAGEA10 | ENSG00000124260 | AMASASSSA | 1974 | HLA-C*14:02 |
| 3358 | MAGEA10 | ENSG00000124260 | APLAVEEDA | 1975 | HLA-B*56:01 |
| 3359 | MAGEA10 | ENSG00000124260 | AQAPLAVEE | 1976 | HLA-B*27:05 |
| 3360 | MAGEA10 | ENSG00000124260 | AQIACSSPSV | 1977 | HLA-B*13:02 |
| 3361 | MAGEA10 | ENSG00000124260 | ASASSSATGSF | 1978 | HLA-A*25:01 |
| 3362 | MAGEA10 | ENSG00000124260 | ASASSSATGSF | 1978 | HLA-A*26:01 |
| 3363 | MAGEA10 | ENSG00000124260 | ASASSSATGSF | 1978 | HLA-A*30:02 |
| 3364 | MAGEA10 | ENSG00000124260 | ASASSSATGSF | 1978 | HLA-A*32:01 |
| 3365 | MAGEA10 | ENSG00000124260 | ASASSSATGSF | 1978 | HLA-B*15:01 |
| 3366 | MAGEA10 | ENSG00000124260 | ASASSSATGSF | 1978 | HLA-B*46:01 |
| 3367 | MAGEA10 | ENSG00000124260 | ASASSSATGSF | 1978 | HLA-B*58:01 |
| 3368 | MAGEA10 | ENSG00000124260 | ASASSSATGSF | 1978 | HLA-C*16:04 |
| 3369 | MAGEA10 | ENSG00000124260 | ASSSATGSFSY | 1979 | HLA-A*01:01 |
| 3370 | MAGEA10 | ENSG00000124260 | ASSSATGSFSY | 1979 | HLA-A*03:02 |
| 3371 | MAGEA10 | ENSG00000124260 | ASSSATGSFSY | 1979 | HLA-A*11:01 |
| 3372 | MAGEA10 | ENSG00000124260 | ASSSATGSFSY | 1979 | HLA-A*26:01 |
| 3373 | MAGEA10 | ENSG00000124260 | ASSSATGSFSY | 1979 | HLA-A*29:02 |
| 3374 | MAGEA10 | ENSG00000124260 | ASSSATGSFSY | 1979 | HLA-A*30:02 |
| 3375 | MAGEA10 | ENSG00000124260 | ASSSATGSFSY | 1979 | HLA-A*32:01 |
| 3376 | MAGEA10 | ENSG00000124260 | ASSSATGSFSY | 1979 | HLA-B*58:01 |
| 3377 | MAGEA10 | ENSG00000124260 | ASSSATGSFSY | 1979 | HLA-C*16:02 |
| 3378 | MAGEA10 | ENSG00000124260 | ASSSATGSFSY | 1979 | HLA-C*16:04 |
| 3379 | MAGEA10 | ENSG00000124260 | ASSSATGSF | 1980 | HLA-A*25:01 |
| 3380 | MAGEA10 | ENSG00000124260 | ASSSATGSF | 1980 | HLA-A*26:01 |
| 3381 | MAGEA10 | ENSG00000124260 | ASSSATGSF | 1980 | HLA-A*30:02 |
| 3382 | MAGEA10 | ENSG00000124260 | ASSSATGSF | 1980 | HLA-A*32:01 |
| 3383 | MAGEA10 | ENSG00000124260 | ASSSATGSF | 1980 | HLA-B*15:01 |
| 3384 | MAGEA10 | ENSG00000124260 | ASSSATGSF | 1980 | HLA-B*15:03 |
| 3385 | MAGEA10 | ENSG00000124260 | ASSSATGSF | 1980 | HLA-B*37:01 |
| 3386 | MAGEA10 | ENSG00000124260 | ASSSATGSF | 1980 | HLA-B*46:01 |
| 3387 | MAGEA10 | ENSG00000124260 | ASSSATGSF | 1980 | HLA-B*58:01 |
| 3388 | MAGEA10 | ENSG00000124260 | ASSSATGSF | 1980 | HLA-C*01:02 |
| 3389 | MAGEA10 | ENSG00000124260 | ASSSATGSF | 1980 | HLA-C*02:02 |
| 3390 | MAGEA10 | ENSG00000124260 | ASSSATGSF | 1980 | HLA-C*03:03 |
| 3391 | MAGEA10 | ENSG00000124260 | ASSSATGSF | 1980 | HLA-C*03:04 |
| 3392 | MAGEA10 | ENSG00000124260 | ASSSATGSF | 1980 | HLA-C*05:01 |
| 3393 | MAGEA10 | ENSG00000124260 | ASSSATGSF | 1980 | HLA-C*14:02 |
| 3394 | MAGEA10 | ENSG00000124260 | ASSSATGSF | 1980 | HLA-C*16:01 |
| 3395 | MAGEA10 | ENSG00000124260 | ASSSATGSF | 1980 | HLA-C*16:02 |
| 3396 | MAGEA10 | ENSG00000124260 | ASSSATGSF | 1980 | HLA-C*16:04 |
| 3397 | MAGEA10 | ENSG00000124260 | ASSSTSTSSSF | 1981 | HLA-A*30:02 |
| 3398 | MAGEA10 | ENSG00000124260 | ASSSTSTSSSF | 1981 | HLA-A*32:01 |
| 3399 | MAGEA10 | ENSG00000124260 | ASSSTSTSSSF | 1981 | HLA-B*58:01 |
| 3400 | MAGEA10 | ENSG00000124260 | ATTDDTTAM | 1982 | HLA-A*25:01 |
| 3401 | MAGEA10 | ENSG00000124260 | ATTDDTTAM | 1982 | HLA-A*26:01 |
| 3402 | MAGEA10 | ENSG00000124260 | ATTDDTTAM | 1982 | HLA-A*32:01 |
| 3403 | MAGEA10 | ENSG00000124260 | ATTDDTTAM | 1982 | HLA-B*15:01 |
| 3404 | MAGEA10 | ENSG00000124260 | ATTDDTTAM | 1982 | HLA-B*39:01 |
| 3405 | MAGEA10 | ENSG00000124260 | ATTDDTTAM | 1982 | HLA-B*46:01 |
| 3406 | MAGEA10 | ENSG00000124260 | ATTDDTTAM | 1982 | HLA-B*58:01 |
| 3407 | MAGEA10 | ENSG00000124260 | ATTDDTTAM | 1982 | HLA-C*01:02 |
| 3408 | MAGEA10 | ENSG00000124260 | ATTDDTTAM | 1982 | HLA-C*02:02 |
| 3409 | MAGEA10 | ENSG00000124260 | ATTDDTTAM | 1982 | HLA-C*03:03 |
| 3410 | MAGEA10 | ENSG00000124260 | ATTDDTTAM | 1982 | HLA-C*03:04 |
| 3411 | MAGEA10 | ENSG00000124260 | ATTDDTTAM | 1982 | HLA-C*04:01 |
| 3412 | MAGEA10 | ENSG00000124260 | ATTDDTTAM | 1982 | HLA-C*05:01 |
| 3413 | MAGEA10 | ENSG00000124260 | ATTDDTTAM | 1982 | HLA-C*07:06 |
| 3414 | MAGEA10 | ENSG00000124260 | ATTDDTTAM | 1982 | HLA-C*12:03 |
| 3415 | MAGEA10 | ENSG00000124260 | ATTDDTTAM | 1982 | HLA-C*14:02 |
| 3416 | MAGEA10 | ENSG00000124260 | ATTDDTTAM | 1982 | HLA-C*16:01 |
| 3417 | MAGEA10 | ENSG00000124260 | ATTDDTTAM | 1982 | HLA-C*16:02 |
| 3418 | MAGEA10 | ENSG00000124260 | ATTDDTTAM | 1982 | HLA-C*I6:04 |
| 3419 | MAGEA10 | ENSG00000124260 | DDETPNPPQSA | 1983 | HLA-B*39:01 |
| 3420 | MAGEA10 | ENSG00000124260 | DEKVTDLVQF | 1984 | HLA-B*18:01 |
| 3421 | MAGEA10 | ENSG00000124260 | DEKVTDLVQF | 1984 | HLA-B*44:02 |
| 3422 | MAGEA10 | ENSG00000124260 | DEKVTDLV | 1985 | HLA-B*18:01 |
| 3423 | MAGEA10 | ENSG00000124260 | DEKVTDLV | 1985 | HLA-B*49:01 |
| 3424 | MAGEA10 | ENSG00000124260 | DETPNPPQSA | 1986 | HLA-B*18:01 |
| 3425 | MAGEA10 | ENSG00000124260 | DETPNPPQS | 1987 | HLA-B*18:01 |
| 3426 | MAGEA10 | ENSG00000124260 | DETPNPPQ | 1988 | HLA-B*18:01 |
| 3427 | MAGEA10 | ENSG00000124260 | DGMEHLIY | 1989 | HLA-B*08:01 |
| 3428 | MAGEA10 | ENSG00000124260 | DGMEHLIY | 1989 | HLA-B*18:01 |
| 3429 | MAGEA10 | ENSG00000124260 | DGMEHLIY | 1989 | HLA-B*35:01 |
| 3430 | MAGEA10 | ENSG00000124260 | DGMEHLIY | 1989 | HLA-C*07:01 |
| 3431 | MAGEA10 | ENSG00000124260 | DGMEHLIY | 1989 | HLA-C*12:03 |
| 3432 | MAGEA10 | ENSG00000124260 | DGMLSDVQSM | 1990 | HLA-B*51:01 |
| 3433 | MAGEA10 | ENSG00000124260 | DPTGHSFVL | 1991 | HLA-B*08:01 |
| 3434 | MAGEA10 | ENSG00000124260 | DPTGHSFVL | 1991 | HLA-B*35:01 |
| 3435 | MAGEA10 | ENSG00000124260 | DPTGHSFVL | 1991 | HLA-B*35:03 |
| 3436 | MAGEA10 | ENSG00000124260 | DPTGHSFV | 1992 | HLA-B*51:01 |
| 3437 | MAGEA10 | ENSG00000124260 | DVKEVDPTGH | 1993 | HLA-A*26:01 |
| 3438 | MAGEA10 | ENSG00000124260 | DVKEVDPTGH | 1993 | HLA-A*33:01 |
| 3439 | MAGEA10 | ENSG00000124260 | DVKEVDPTGH | 1993 | HLA-A*68:01 |
| 3440 | MAGEA10 | ENSG00000124260 | EALNMMGLY | 1994 | HLA-A*01:01 |
| 3441 | MAGEA10 | ENSG00000124260 | EALNMMGLY | 1994 | HLA-A*25:01 |
| 3442 | MAGEA10 | ENSG00000124260 | EALNMMGLY | 1994 | HLA-A*26:01 |
| 3443 | MAGEA10 | ENSG00000124260 | EALNMMGLY | 1994 | HLA-A*29:02 |
| 3444 | MAGEA10 | ENSG00000124260 | EALNMMGLY | 1994 | HLA-B*35:01 |
| 3445 | MAGEA10 | ENSG00000124260 | EALNMMGL | 1995 | HLA-B*51:01 |
| 3446 | MAGEA10 | ENSG00000124260 | EASECMLLV | 1996 | HLA-A*68:02 |
| 3447 | MAGEA10 | ENSG00000124260 | EASECMLLV | 1996 | HLA-B*51:01 |
| 3448 | MAGEA10 | ENSG00000124260 | EDHFPLLF | 1997 | HLA-C*07:01 |
| 3449 | MAGEA10 | ENSG00000124260 | EESPSTLQVL | 1998 | HLA-A*25:01 |
| 3450 | MAGEA10 | ENSG00000124260 | EESPSTLQVL | 1998 | HLA-A*30:01 |
| 3451 | MAGEA10 | ENSG00000124260 | EESPSTLQVL | 1998 | HLA-B*27:02 |
| 3452 | MAGEA10 | ENSG00000124260 | EESPSTLQVL | 1998 | HLA-B*38:01 |
| 3453 | MAGEA10 | ENSG00000124260 | EESPSTLQVL | 1998 | HLA-B*39:01 |
| 3454 | MAGEA10 | ENSG00000124260 | EESPSTLQVL | 1998 | HLA-B*40:01 |
| 3455 | MAGEA10 | ENSG00000124260 | EESPSTLQVL | 1998 | HLA-B*40:02 |
| 3456 | MAGEA10 | ENSG00000124260 | EESPSTLQVL | 1998 | HLA-B*44:02 |
| 3457 | MAGEA10 | ENSG00000124260 | EESPSTLQVL | 1998 | HLA-B*44:03 |
| 3458 | MAGEA10 | ENSG00000124260 | EESPSTLQV | 1999 | HLA-A*30:01 |
| 3459 | MAGEA10 | ENSG00000124260 | EESPSTLQV | 1999 | HLA-B*13:02 |
| 3460 | MAGEA10 | ENSG00000124260 | EESPSTLQV | 1999 | HLA-B*18:01 |
| 3461 | MAGEA10 | ENSG00000124260 | EESPSTLQV | 1999 | HLA-B*37:01 |
| 3462 | MAGEA10 | ENSG00000124260 | EESPSTLQV | 1999 | HLA-B*40:01 |
| 3463 | MAGEA10 | ENSG00000124260 | EESPSTLQV | 1999 | HLA-B*44:02 |
| 3464 | MAGEA10 | ENSG00000124260 | EESPSTLQV | 1999 | HLA-B*44:03 |
| 3465 | MAGEA10 | ENSG00000124260 | EESPSTLQV | 1999 | HLA-B*49:01 |
| 3466 | MAGEA10 | ENSG00000124260 | EEVIWEAL | 2000 | HLA-B*18:01 |
| 3467 | MAGEA10 | ENSG00000124260 | EGAQAPLAV | 2001 | HLA-B*13:02 |
| 3468 | MAGEA10 | ENSG00000124260 | EGAQAPLAV | 2001 | HLA-B*51:01 |
| 3469 | MAGEA10 | ENSG00000124260 | EHLIYGEPR | 2002 | HLA-A*33:01 |
| 3470 | MAGEA10 | ENSG00000124260 | EHLIYGEPR | 2002 | HLA-A*33:03 |
| 3471 | MAGEA10 | ENSG00000124260 | EIDEKVTDL | 2003 | HLA-A*02:07 |
| 3472 | MAGEA10 | ENSG00000124260 | EIDEKVTDL | 2003 | HLA-C*05:01 |
| 3473 | MAGEA10 | ENSG00000124260 | EILESVIRNY | 2004 | HLA-A*25:01 |
| 3474 | MAGEA10 | ENSG00000124260 | EILESVIRNY | 2004 | HLA-A*26:01 |
| 3475 | MAGEA10 | ENSG00000124260 | EILESVIRNY | 2004 | HLA-A*29:02 |
| 3476 | MAGEA10 | ENSG00000124260 | EILESVIRNY | 2004 | HLA-A*30:02 |
| 3477 | MAGEA10 | ENSG00000124260 | EILESVIRNY | 2004 | HLA-A*33:01 |
| 3478 | MAGEA10 | ENSG00000124260 | EILESVIRNY | 2004 | HLA-A*33:03 |
| 3479 | MAGEA10 | ENSG00000124260 | EILESVIRNY | 2004 | HLA-B*44:02 |
| 3480 | MAGEA10 | ENSG00000124260 | EILESVIRNY | 2004 | HLA-B*44:03 |
| 3481 | MAGEA10 | ENSG00000124260 | EILESVIRNY | 2004 | HLA-C*07:06 |
| 3482 | MAGEA10 | ENSG00000124260 | EILESVIR | 2005 | HLA-A*33:03 |
| 3483 | MAGEA10 | ENSG00000124260 | EKVTDLVQF | 2006 | HLA-A*23:01 |
| 3484 | MAGEA10 | ENSG00000124260 | EPITKAEIL | 2007 | HLA-B*07:02 |
| 3485 | MAGEA10 | ENSG00000124260 | EPITKAEIL | 2007 | HLA-B*08:01 |
| 3486 | MAGEA10 | ENSG00000124260 | EPITKAEIL | 2007 | HLA-B*35:01 |
| 3487 | MAGEA10 | ENSG00000124260 | EPITKAEIL | 2007 | HLA-B*35:03 |
| 3488 | MAGEA10 | ENSG00000124260 | EPITKAEIL | 2007 | HLA-C*07:02 |
| 3489 | MAGEA10 | ENSG00000124260 | EPITKAEI | 2008 | HLA-B*08:01 |
| 3490 | MAGEA10 | ENSG00000124260 | EPITKAEI | 2008 | HLA-B*51:01 |
| 3491 | MAGEA10 | ENSG00000124260 | ESLPRSEIDEK | 2009 | HLA-A*33:01 |
| 3492 | MAGEA10 | ENSG00000124260 | ESPSTLQVL | 2010 | HLA-A*25:01 |
| 3493 | MAGEA10 | ENSG00000124260 | ESPSTLQVL | 2010 | HLA-C*01:02 |
| 3494 | MAGEA10 | ENSG00000124260 | ETPNPPQSAQI | 2011 | HLA-A*26:01 |
| 3495 | MAGEA10 | ENSG00000124260 | ETPNPPQSAQI | 2011 | HLA-A*68:02 |
| 3496 | MAGEA10 | ENSG00000124260 | ETPNPPQSA | 2012 | HLA-A*33:03 |
| 3497 | MAGEA10 | ENSG00000124260 | EVDPTGHSFVL | 2013 | HLA-A*01:01 |
| 3498 | MAGEA10 | ENSG00000124260 | EVDPTGHSFVL | 2013 | HLA-A*02:07 |
| 3499 | MAGEA10 | ENSG00000124260 | EVDPTGHSFVL | 2013 | HLA-A*68:02 |
| 3500 | MAGEA10 | ENSG00000124260 | EVDPTGHSFVL | 2013 | HLA-B*35:03 |
| 3501 | MAGEA10 | ENSG00000124260 | EVDPTGHSFVL | 2013 | HLA-B*38:01 |
| 3502 | MAGEA10 | ENSG00000124260 | EVDPTGHSFVL | 2013 | HLA-C*05:01 |
| 3503 | MAGEA10 | ENSG00000124260 | EVDPTGHSFV | 2014 | HLA-A*01:01 |
| 3504 | MAGEA10 | ENSG00000124260 | EVDPTGHSFV | 2014 | HLA-A*26:01 |
| 3505 | MAGEA10 | ENSG00000124260 | EVDPTGHSFV | 2014 | HLA-A*68:02 |
| 3506 | MAGEA10 | ENSG00000124260 | EVDPTGHSFV | 2014 | HLA-C*05:01 |
| 3507 | MAGEA10 | ENSG00000124260 | EVDPTGHSF | 2015 | HLA-A*01:01 |
| 3508 | MAGEA10 | ENSG00000124260 | EVDPTGHSF | 2015 | HLA-A*02:07 |
| 3509 | MAGEA10 | ENSG00000124260 | EVDPTGHSF | 2015 | HLA-A*23:01 |
| 3510 | MAGEA10 | ENSG00000124260 | EVDPTGHSF | 2015 | HLA-A*24:02 |
| 3511 | MAGEA10 | ENSG00000124260 | EVDPTGHSF | 2015 | HLA-A*25:01 |
| 3512 | MAGEA10 | ENSG00000124260 | EVDPTGHSF | 2015 | HLA-A*26:01 |
| 3513 | MAGEA10 | ENSG00000124260 | EVDPTGHSF | 2015 | HLA-A*29:02 |
| 3514 | MAGEA10 | ENSG00000124260 | EVDPTGHSF | 2015 | HLA-A*30:02 |
| 3515 | MAGEA10 | ENSG00000124260 | EVDPTGHSF | 2015 | HLA-A*32:01 |
| 3516 | MAGEA10 | ENSG00000124260 | EVDPTGHSF | 2015 | HLA-A*33:01 |
| 3517 | MAGEA10 | ENSG00000124260 | EVDPTGHSF | 2015 | HLA-A*33:03 |
| 3518 | MAGEA10 | ENSG00000124260 | EVDPTGHSF | 2015 | HLA-A*68:01 |
| 3519 | MAGEA10 | ENSG00000124260 | EVDPTGHSF | 2015 | HLA-B*15:01 |
| 3520 | MAGEA10 | ENSG00000124260 | EVDPTGHSF | 2015 | HLA-B*15:03 |
| 3521 | MAGEA10 | ENSG00000124260 | EVDPTGHSF | 2015 | HLA-B*18:01 |
| 3522 | MAGEA10 | ENSG00000124260 | EVDPTGHSF | 2015 | HLA-B*27:05 |
| 3523 | MAGEA10 | ENSG00000124260 | EVDPTGHSF | 2015 | HLA-B*35:01 |
| 3524 | MAGEA10 | ENSG00000124260 | EVDPTGHSF | 2015 | HLA-B*35:03 |
| 3525 | MAGEA10 | ENSG00000124260 | EVDPTGHSF | 2015 | HLA-B*38:01 |
| 3526 | MAGEA10 | ENSG00000124260 | EVDPTGHSF | 2015 | HLA-B*39:01 |
| 3527 | MAGEA10 | ENSG00000124260 | EVDPTGHSF | 2015 | HLA-B*44:02 |
| 3528 | MAGEA10 | ENSG00000124260 | EVDPTGHSF | 2015 | HLA-B*44:03 |
| 3529 | MAGEA10 | ENSG00000124260 | EVDPTGHSF | 2015 | HLA-B*46:01 |
| 3530 | MAGEA10 | ENSG00000124260 | EVDPTGHSF | 2015 | HLA-B*55:01 |
| 3531 | MAGEA10 | ENSG00000124260 | EVDPTGHSF | 2015 | HLA-B*57:01 |
| 3532 | MAGEA10 | ENSG00000124260 | EVDPTGHSF | 2015 | HLA-B*58:01 |
| 3533 | MAGEA10 | ENSG00000124260 | EVDPTGHSF | 2015 | HLA-C*02:02 |
| 3534 | MAGEA10 | ENSG00000124260 | EVDPTGHSF | 2015 | HLA-C*03:03 |
| 3535 | MAGEA10 | ENSG00000124260 | EVDPTGHSF | 2015 | HLA-C*03:04 |
| 3536 | MAGEA10 | ENSG00000124260 | EVDPTGHSF | 2015 | HLA-C*04:01 |
| 3537 | MAGEA10 | ENSG00000124260 | EVDPTGHSF | 2015 | HLA-C*05:01 |
| 3538 | MAGEA10 | ENSG00000124260 | EVDPTGHSF | 2015 | HLA-C*07:04 |
| 3539 | MAGEA10 | ENSG00000124260 | EVDPTGHSF | 2015 | HLA-C*07:06 |
| 3540 | MAGEA10 | ENSG00000124260 | EVDPTGHSF | 2015 | HLA-C*14:02 |
| 3541 | MAGEA10 | ENSG00000124260 | EVDPTGHSF | 2015 | HLA-C*16:02 |
| 3542 | MAGEA10 | ENSG00000124260 | EVDPTGHSF | 2015 | HLA-C*16:04 |
| 3543 | MAGEA10 | ENSG00000124260 | EVIWEALNMM | 2016 | HLA-A*25:01 |
| 3544 | MAGEA10 | ENSG00000124260 | EVIWEALNMM | 2016 | HLA-A*26:01 |
| 3545 | MAGEA10 | ENSG00000124260 | EVIWEALNM | 2017 | HLA-A*25:01 |
| 3546 | MAGEA10 | ENSG00000124260 | EVIWEALNM | 2017 | HLA-A*26:01 |
| 3547 | MAGEA10 | ENSG00000124260 | FGIDVKEV | 2018 | HLA-B*51:01 |
| 3548 | MAGEA10 | ENSG00000124260 | FGIDVKEV | 2018 | HLA-C*12:03 |
| 3549 | MAGEA10 | ENSG00000124260 | FGIDVKEV | 2018 | HLA-C*16:02 |
| 3550 | MAGEA10 | ENSG00000124260 | FLWGPRAHAEI | 2019 | HLA-A*02:01 |
| 3551 | MAGEA10 | ENSG00000124260 | FLWGPRAHAEI | 2019 | HLA-A*02:07 |
| 3552 | MAGEA10 | ENSG00000124260 | FPLLFSEASEC | 2020 | HLA-B*54:01 |
| 3553 | MAGEA10 | ENSG00000124260 | FPLLFSEAS | 2021 | HLA-B*54:01 |
| 3554 | MAGEA10 | ENSG00000124260 | FPLLFSEA | 2022 | HLA-B*51:01 |
| 3555 | MAGEA10 | ENSG00000124260 | FPLLFSEA | 2022 | HLA-B*54:01 |
| 3556 | MAGEA10 | ENSG00000124260 | FPLLFSEA | 2022 | HLA-B*55:01 |
| 3557 | MAGEA10 | ENSG00000124260 | FPLLFSEA | 2022 | HLA-B*56:01 |
| 3558 | MAGEA10 | ENSG00000124260 | FPLWYEEAL | 2023 | HLA-B*35:01 |
| 3559 | MAGEA10 | ENSG00000124260 | FPLWYEEAL | 2023 | HLA-B*35:03 |
| 3560 | MAGEA10 | ENSG00000124260 | FPLWYEEAL | 2023 | HLA-B*54:01 |
| 3561 | MAGEA10 | ENSG00000124260 | FPLWYEEA | 2024 | HLA-B*54:01 |
| 3562 | MAGEA10 | ENSG00000124260 | FPSSFPSSSS | 2025 | HLA-B*54:01 |
| 3563 | MAGEA10 | ENSG00000124260 | FPSSFPSSSS | 2025 | HLA-B*56:01 |
| 3564 | MAGEA10 | ENSG00000124260 | FPSSFPSSS | 2026 | HLA-B*54:01 |
| 3565 | MAGEA10 | ENSG00000124260 | FPSSFPSSS | 2026 | HLA-B*56:01 |
| 3566 | MAGEA10 | ENSG00000124260 | FPSSFPSS | 2027 | HLA-B*54:01 |
| 3567 | MAGEA10 | ENSG00000124260 | FPSSSSSSS | 2028 | HLA-B*39:01 |
| 3568 | MAGEA10 | ENSG00000124260 | FSEASECML | 2029 | HLA-C*03:03 |
| 3569 | MAGEA10 | ENSG00000124260 | FSEASECML | 2029 | HLA-C*03:04 |
| 3570 | MAGEA10 | ENSG00000124260 | FSEASECML | 2029 | HLA-C*05:01 |
| 3571 | MAGEA10 | ENSG00000124260 | FVLVTSLGLTY | 2030 | HLA-A*29:02 |
| 3572 | MAGEA10 | ENSG00000124260 | GHSFVLVTSL | 2031 | HLA-B*38:01 |
| 3573 | MAGEA10 | ENSG00000124260 | GLYDGMEHLIY | 2032 | HLA-A*01:01 |
| 3574 | MAGEA10 | ENSG00000124260 | GLYDGMEHLIY | 2032 | HLA-A*03:01 |
| 3575 | MAGEA10 | ENSG00000124260 | GLYDGMEHLIY | 2032 | HLA-A*29:02 |
| 3576 | MAGEA10 | ENSG00000124260 | GLYDGMEHLI | 2033 | HLA-A*02:01 |
| 3577 | MAGEA10 | ENSG00000124260 | GLYDGMEHLI | 2033 | HLA-A*02:03 |
| 3578 | MAGEA10 | ENSG00000124260 | GLYDGMEHLI | 2033 | HLA-A*02:04 |
| 3579 | MAGEA10 | ENSG00000124260 | GLYDGMEHLI | 2033 | HLA-A*02:07 |
| 3580 | MAGEA10 | ENSG00000124260 | GLYDGMEHLI | 2033 | HLA-A*03:01 |
| 3581 | MAGEA10 | ENSG00000124260 | GLYDGMEHLI | 2033 | HLA-A*30:01 |
| 3582 | MAGEA10 | ENSG00000124260 | GLYDGMEHLI | 2033 | HLA-B*13:02 |
| 3583 | MAGEA10 | ENSG00000124260 | GLYDGMEHLI | 2033 | HLA-B*55:01 |
| 3584 | MAGEA10 | ENSG00000124260 | GLYDGMEHLI | 2033 | HLA-C*06:02 |
| 3585 | MAGEA10 | ENSG00000124260 | GLYDGMEHL | 2034 | HLA-A*02:01 |
| 3586 | MAGEA10 | ENSG00000124260 | GLYDGMEHL | 2034 | HLA-A*02:03 |
| 3587 | MAGEA10 | ENSG00000124260 | GLYDGMEHL | 2034 | HLA-A*02:04 |
| 3588 | MAGEA10 | ENSG00000124260 | GLYDGMEHL | 2034 | HLA-A*02:07 |
| 3589 | MAGEA10 | ENSG00000124260 | GLYDGMEHL | 2034 | HLA-A*03:01 |
| 3590 | MAGEA10 | ENSG00000124260 | GLYDGMEHL | 2034 | HLA-A*30:01 |
| 3591 | MAGEA10 | ENSG00000124260 | GLYDGMEHL | 2034 | HLA-A*68:02 |
| 3592 | MAGEA10 | ENSG00000124260 | GLYDGMEHL | 2034 | HLA-B*13:02 |
| 3593 | MAGEA10 | ENSG00000124260 | GLYDGMEHL | 2034 | HLA-B*15:01 |
| 3594 | MAGEA10 | ENSG00000124260 | GLYDGMEHL | 2034 | HLA-B*15:03 |
| 3595 | MAGEA10 | ENSG00000124260 | GLYDGMEHL | 2034 | HLA-B*40:01 |
| 3596 | MAGEA10 | ENSG00000124260 | GLYDGMEHL | 2034 | HLA-B*46:01 |
| 3597 | MAGEA10 | ENSG00000124260 | GLYDGMEHL | 2034 | HLA-B*55:01 |
| 3598 | MAGEA10 | ENSG00000124260 | GLYDGMEHL | 2034 | HLA-C*02:02 |
| 3599 | MAGEA10 | ENSG00000124260 | GMLSDVQSMPK | 2035 | HLA-A*03:01 |
| 3600 | MAGEA10 | ENSG00000124260 | GMLSDVQSMPK | 2035 | HLA-A*03:02 |
| 3601 | MAGEA10 | ENSG00000124260 | GMLSDVQSMPK | 2035 | HLA-A*11:01 |
| 3602 | MAGEA10 | ENSG00000124260 | GMLSDVQSMPK | 2035 | HLA-B*27:05 |
| 3603 | MAGEA10 | ENSG00000124260 | GMLSDVQSM | 2036 | HLA-A*02:01 |
| 3604 | MAGEA10 | ENSG00000124260 | GMLSDVQSM | 2036 | HLA-A*02:04 |
| 3605 | MAGEA10 | ENSG00000124260 | GMLSDVQSM | 2036 | HLA-A*23:01 |
| 3606 | MAGEA10 | ENSG00000124260 | GMLSDVQSM | 2036 | HLA-A*32:01 |
| 3607 | MAGEA10 | ENSG00000124260 | GMLSDVQSM | 2036 | HLA-B*13:02 |
| 3608 | MAGEA10 | ENSG00000124260 | GMLSDVQSM | 2036 | HLA-B*15:01 |
| 3609 | MAGEA10 | ENSG00000124260 | GMLSDVQSM | 2036 | HLA-B*15:03 |
| 3610 | MAGEA10 | ENSG00000124260 | GMLSDVQSM | 2036 | HLA-B*27:05 |
| 3611 | MAGEA10 | ENSG00000124260 | GMLSDVQSM | 2036 | HLA-B*37:01 |
| 3612 | MAGEA10 | ENSG00000124260 | GMLSDVQSM | 2036 | HLA-B*46:01 |
| 3613 | MAGEA10 | ENSG00000124260 | GMLSDVQSM | 2036 | HLA-B*55:01 |
| 3614 | MAGEA10 | ENSG00000124260 | GMLSDVQSM | 2036 | HLA-B*58:01 |
| 3615 | MAGEA10 | ENSG00000124260 | GMLSDVQSM | 2036 | HLA-C*01:02 |
| 3616 | MAGEA10 | ENSG00000124260 | GMLSDVQSM | 2036 | HLA-C*07:04 |
| 3617 | MAGEA10 | ENSG00000124260 | GMLSDVQSM | 2036 | HLA-C*14:02 |
| 3618 | MAGEA10 | ENSG00000124260 | GPRAHAEI | 2037 | HLA-B*07:02 |
| 3619 | MAGEA10 | ENSG00000124260 | GPRAHAEI | 2037 | HLA-C*07:02 |
| 3620 | MAGEA10 | ENSG00000124260 | GSDPARYEFLW | 2038 | HLA-B*57:01 |
| 3621 | MAGEA10 | ENSG00000124260 | GSDPARYEF | 2039 | HLA-A*01:01 |
| 3622 | MAGEA10 | ENSG00000124260 | GSDPARYEF | 2039 | HLA-A*30:02 |
| 3623 | MAGEA10 | ENSG00000124260 | GSDPARYEF | 2039 | HLA-A*32:01 |
| 3624 | MAGEA10 | ENSG00000124260 | GSDPARYEF | 2039 | HLA-B*15:01 |
| 3625 | MAGEA10 | ENSG00000124260 | GSDPARYEF | 2039 | HLA-B*38:01 |
| 3626 | MAGEA10 | ENSG00000124260 | GSDPARYEF | 2039 | HLA-B*57:01 |
| 3627 | MAGEA10 | ENSG00000124260 | GSDPARYEF | 2039 | HLA-B*58:01 |
| 3628 | MAGEA10 | ENSG00000124260 | GSDPARYEF | 2039 | HLA-C*02:02 |
| 3629 | MAGEA10 | ENSG00000124260 | GSDPARYEF | 2039 | HLA-C*03:04 |
| 3630 | MAGEA10 | ENSG00000124260 | GSDPARYEF | 2039 | HLA-C*05:01 |
| 3631 | MAGEA10 | ENSG00000124260 | GSDPARYEF | 2039 | HLA-C*16:01 |
| 3632 | MAGEA10 | ENSG00000124260 | GSDPARYEF | 2039 | HLA-C*16:04 |
| 3633 | MAGEA10 | ENSG00000124260 | GSDPRSFPLWY | 2040 | HLA-A*01:01 |
| 3634 | MAGEA10 | ENSG00000124260 | GSDPRSFPLW | 2041 | HLA-B*57:01 |
| 3635 | MAGEA10 | ENSG00000124260 | GSDPRSFPL | 2042 | HLA-A*01:01 |
| 3636 | MAGEA10 | ENSG00000124260 | GSDPRSFPL | 2042 | HLA-C*03:04 |
| 3637 | MAGEA10 | ENSG00000124260 | GSDPRSFPL | 2042 | HLA-C*05:01 |
| 3638 | MAGEA10 | ENSG00000124260 | HAEIRKMSL | 2043 | HLA-B*08:01 |
| 3639 | MAGEA10 | ENSG00000124260 | HSFVLVTSL | 2044 | HLA-A*68:02 |
| 3640 | MAGEA10 | ENSG00000124260 | HSFVLVTSL | 2044 | HLA-B*08:01 |
| 3641 | MAGEA10 | ENSG00000124260 | HSFVLVTSL | 2044 | HLA-B*15:03 |
| 3642 | MAGEA10 | ENSG00000124260 | HSFVLVTSL | 2044 | HLA-B*18:01 |
| 3643 | MAGEA10 | ENSG00000124260 | HSFVLVTSL | 2044 | HLA-B*35:01 |
| 3644 | MAGEA10 | ENSG00000124260 | HSFVLVTSL | 2044 | HLA-B*40:01 |
| 3645 | MAGEA10 | ENSG00000124260 | HSFVLVTSL | 2044 | HLA-B*40:02 |
| 3646 | MAGEA10 | ENSG00000124260 | HSFVLVTSL | 2044 | HLA-B*46:01 |
| 3647 | MAGEA10 | ENSG00000124260 | HSFVLVTSL | 2044 | HLA-B*58:01 |
| 3648 | MAGEA10 | ENSG00000124260 | HSFVLVTSL | 2044 | HLA-C*02:02 |
| 3649 | MAGEA10 | ENSG00000124260 | HSFVLVTSL | 2044 | HLA-C*03:03 |
| 3650 | MAGEA10 | ENSG00000124260 | HSFVLVTSL | 2044 | HLA-C*03:04 |
| 3651 | MAGEA10 | ENSG00000124260 | HSFVLVTSL | 2044 | HLA-C*12:03 |
| 3652 | MAGEA10 | ENSG00000124260 | IACSSPSVV | 2045 | HLA-B*51:01 |
| 3653 | MAGEA10 | ENSG00000124260 | IACSSPSVV | 2045 | HLA-C*12:03 |
| 3654 | MAGEA10 | ENSG00000124260 | IACSSPSV | 2046 | HLA-B*51:01 |
| 3655 | MAGEA10 | ENSG00000124260 | IATTDDTTAM | 2047 | HLA-B*35:01 |
| 3656 | MAGEA10 | ENSG00000124260 | IATTDDTTAM | 2047 | HLA-B*35:03 |
| 3657 | MAGEA10 | ENSG00000124260 | IATTDDTTAM | 2047 | HLA-B*39:01 |
| 3658 | MAGEA10 | ENSG00000124260 | IATTDDTTAM | 2047 | HLA-B*55:01 |
| 3659 | MAGEA10 | ENSG00000124260 | IATTDDTTAM | 2047 | HLA-C*03:03 |
| 3660 | MAGEA10 | ENSG00000124260 | IATTDDTTAM | 2047 | HLA-C*03:04 |
| 3661 | MAGEA10 | ENSG00000124260 | IATTDDTTAM | 2047 | HLA-C*05:01 |
| 3662 | MAGEA10 | ENSG00000124260 | IATTDDTTA | 2048 | HLA-B*35:03 |
| 3663 | MAGEA10 | ENSG00000124260 | IDEKVTDL | 2049 | HLA-B*37:01 |
| 3664 | MAGEA10 | ENSG00000124260 | ILESVIRNY | 2050 | HLA-A*01:01 |
| 3665 | MAGEA10 | ENSG00000124260 | ILESVIRNY | 2050 | HLA-A*02:07 |
| 3666 | MAGEA10 | ENSG00000124260 | ILESVIRNY | 2050 | HLA-A*03:01 |
| 3667 | MAGEA10 | ENSG00000124260 | ILESVIRNY | 2050 | HLA-A*03:02 |
| 3668 | MAGEA10 | ENSG00000124260 | ILESVIRNY | 2050 | HLA-A*29:02 |
| 3669 | MAGEA10 | ENSG00000124260 | ILESVIRNY | 2050 | HLA-A*30:02 |
| 3670 | MAGEA10 | ENSG00000124260 | ILESVIRNY | 2050 | HLA-A*32:01 |
| 3671 | MAGEA10 | ENSG00000124260 | ILESVIRNY | 2050 | HLA-B*15:01 |
| 3672 | MAGEA10 | ENSG00000124260 | ILESVIRNY | 2050 | HLA-B*15:03 |
| 3673 | MAGEA10 | ENSG00000124260 | ILESVIRNY | 2050 | HLA-B*44:02 |
| 3674 | MAGEA10 | ENSG00000124260 | ILESVIRNY | 2050 | HLA-B*44:03 |
| 3675 | MAGEA10 | ENSG00000124260 | ILESVIRNY | 2050 | HLA-B*46:01 |
| 3676 | MAGEA10 | ENSG00000124260 | ILESVIRNY | 2050 | HLA-B*57:01 |
| 3677 | MAGEA10 | ENSG00000124260 | ILESVIRNY | 2050 | HLA-B*58:01 |
| 3678 | MAGEA10 | ENSG00000124260 | ILESVIRNY | 2050 | HLA-C*02:02 |
| 3679 | MAGEA10 | ENSG00000124260 | ILESVIRNY | 2050 | HLA-C*07:04 |
| 3680 | MAGEA10 | ENSG00000124260 | ILESVIRNY | 2050 | HLA-C*16:01 |
| 3681 | MAGEA10 | ENSG00000124260 | ILESVIRNY | 2050 | HLA-C*16:02 |
| 3682 | MAGEA10 | ENSG00000124260 | ILILSIVFI | 2051 | HLA-A*02:01 |
| 3683 | MAGEA10 | ENSG00000124260 | ILILSIVFI | 2051 | HLA-A*02:04 |
| 3684 | MAGEA10 | ENSG00000124260 | ILSIVFIEGY | 2052 | HLA-A*01:01 |
| 3685 | MAGEA10 | ENSG00000124260 | IPSTPEEVSA | 2053 | HLA-B*35:03 |
| 3686 | MAGEA10 | ENSG00000124260 | IPSTPEEVSA | 2053 | HLA-B*54:01 |
| 3687 | MAGEA10 | ENSG00000124260 | IPSTPEEVSA | 2053 | HLA-B*55:01 |
| 3688 | MAGEA10 | ENSG00000124260 | IPSTPEEVSA | 2053 | HLA-B*56:01 |
| 3689 | MAGEA10 | ENSG00000124260 | IYGEPRKLL | 2054 | HLA-A*24:02 |
| 3690 | MAGEA10 | ENSG00000124260 | IYGEPRKL | 2055 | HLA-A*23:01 |
| 3691 | MAGEA10 | ENSG00000124260 | IYGEPRKL | 2055 | HLA-A*24:02 |
| 3692 | MAGEA10 | ENSG00000124260 | IYGEPRKL | 2055 | HLA-C*06:02 |
| 3693 | MAGEA10 | ENSG00000124260 | IYGEPRKL | 2055 | HLA-C*16:01 |
| 3694 | MAGEA10 | ENSG00000124260 | KEESPSTLQVL | 2056 | HLA-A*30:01 |
| 3695 | MAGEA10 | ENSG00000124260 | KEESPSTLQVL | 2056 | HLA-B*40:01 |
| 3696 | MAGEA10 | ENSG00000124260 | KEESPSTLQVL | 2056 | HLA-B*40:02 |
| 3697 | MAGEA10 | ENSG00000124260 | KEESPSTLQVL | 2056 | HLA-B*44:03 |
| 3698 | MAGEA10 | ENSG00000124260 | KEESPSTLQVL | 2056 | HLA-B*49:01 |
| 3699 | MAGEA10 | ENSG00000124260 | KEESPSTLQV | 2057 | HLA-B*40:01 |
| 3700 | MAGEA10 | ENSG00000124260 | KEESPSTLQV | 2057 | HLA-B*49:01 |
| 3701 | MAGEA10 | ENSG00000124260 | KEESPSTL | 2058 | HLA-B*40:01 |
| 3702 | MAGEA10 | ENSG00000124260 | KEPITKAEIL | 2059 | HLA-B*40:01 |
| 3703 | MAGEA10 | ENSG00000124260 | KEPITKAEI | 2060 | HLA-B*37:01 |
| 3704 | MAGEA10 | ENSG00000124260 | KEPITKAEI | 2060 | HLA-B*40:01 |
| 3705 | MAGEA10 | ENSG00000124260 | KEPITKAEI | 2060 | HLA-B*49:01 |
| 3706 | MAGEA10 | ENSG00000124260 | KEVDPTGHSFV | 2061 | HLA-B*49:01 |
| 3707 | MAGEA10 | ENSG00000124260 | KEVDPTGHSF | 379 | HLA-A*23:01 |
| 3708 | MAGEA10 | ENSG00000124260 | KEVDPTGHSF | 379 | HLA-A*24:02 |
| 3709 | MAGEA10 | ENSG00000124260 | KEVDPTGHSF | 379 | HLA-A*25:01 |
| 3710 | MAGEA10 | ENSG00000124260 | KEVDPTGHSF | 379 | HLA-A*30:01 |
| 3711 | MAGEA10 | ENSG00000124260 | KEVDPTGHSF | 379 | HLA-A*30:02 |
| 3712 | MAGEA10 | ENSG00000124260 | KEVDPTGHSF | 379 | HLA-A*32:01 |
| 3713 | MAGEA10 | ENSG00000124260 | KEVDPTGHSF | 379 | HLA-B*15:01 |
| 3714 | MAGEA10 | ENSG00000124260 | KEVDPTGHSF | 379 | HLA-B*15:03 |
| 3715 | MAGEA10 | ENSG00000124260 | KEVDPTGHSF | 379 | HLA-B*18:01 |
| 3716 | MAGEA10 | ENSG00000124260 | KEVDPTGHSF | 379 | HLA-B*27:02 |
| 3717 | MAGEA10 | ENSG00000124260 | KEVDPTGHSF | 379 | HLA-B*27:05 |
| 3718 | MAGEA10 | ENSG00000124260 | KEVDPTGHSF | 379 | HLA-B*37:01 |
| 3719 | MAGEA10 | ENSG00000124260 | KEVDPTGHSF | 379 | HLA-B*38:01 |
| 3720 | MAGEA10 | ENSG00000124260 | KEVDPTGHSF | 379 | HLA-B*40:01 |
| 3721 | MAGEA10 | ENSG00000124260 | KEVDPTGHSF | 379 | HLA-B*40:02 |
| 3722 | MAGEA10 | ENSG00000124260 | KEVDPTGHSF | 379 | HLA-B*44:02 |
| 3723 | MAGEA10 | ENSG00000124260 | KEVDPTGHSF | 379 | HLA-B*44:03 |
| 3724 | MAGEA10 | ENSG00000124260 | KEVDPTGHSF | 379 | HLA-B*49:01 |
| 3725 | MAGEA10 | ENSG00000124260 | KEVDPTGHSF | 379 | HLA-B*57:01 |
| 3726 | MAGEA10 | ENSG00000124260 | KEVDPTGHSF | 379 | HLA-B*58:01 |
| 3727 | MAGEA10 | ENSG00000124260 | KEVDPTGHSF | 379 | HLA-C*02:02 |
| 3728 | MAGEA10 | ENSG00000124260 | KEVDPTGHSF | 379 | HLA-C*03:04 |
| 3729 | MAGEA10 | ENSG00000124260 | KEVDPTGHSF | 379 | HLA-C*16:01 |
| 3730 | MAGEA10 | ENSG00000124260 | KEVDPTGHSF | 379 | HLA-C*16:04 |
| 3731 | MAGEA10 | ENSG00000124260 | KVNGSDPRSF | 2062 | HLA-A*03:02 |
| 3732 | MAGEA10 | ENSG00000124260 | KVNGSDPRSF | 2062 | HLA-A*25:01 |
| 3733 | MAGEA10 | ENSG00000124260 | KVNGSDPRSF | 2062 | HLA-A*30:02 |
| 3734 | MAGEA10 | ENSG00000124260 | KVNGSDPRSF | 2062 | HLA-A*32:01 |
| 3735 | MAGEA10 | ENSG00000124260 | KVNGSDPRSF | 2062 | HLA-B*57:01 |
| 3736 | MAGEA10 | ENSG00000124260 | KVNGSDPRSF | 2062 | HLA-B*58:01 |
| 3737 | MAGEA10 | ENSG00000124260 | KVTDLVQFLL | 2063 | HLA-A*02:04 |
| 3738 | MAGEA10 | ENSG00000124260 | KVTDLVQFL | 2064 | HLA-A*02:01 |
| 3739 | MAGEA10 | ENSG00000124260 | KVTDLVQFL | 2064 | HLA-A*02:03 |
| 3740 | MAGEA10 | ENSG00000124260 | KVTDLVQFL | 2064 | HLA-A*02:04 |
| 3741 | MAGEA10 | ENSG00000124260 | KVTDLVQFL | 2064 | HLA-A*02:07 |
| 3742 | MAGEA10 | ENSG00000124260 | KVTDLVQFL | 2064 | HLA-A*24:02 |
| 3743 | MAGEA10 | ENSG00000124260 | KVTDLVQFL | 2064 | HLA-A*31:01 |
| 3744 | MAGEA10 | ENSG00000124260 | KVTDLVQFL | 2064 | HLA-A*32:01 |
| 3745 | MAGEA10 | ENSG00000124260 | KVTDLVQFL | 2064 | HLA-A*68:02 |
| 3746 | MAGEA10 | ENSG00000124260 | KVTDLVQFL | 2064 | HLA-B*13:02 |
| 3747 | MAGEA10 | ENSG00000124260 | KVTDLVQFL | 2064 | HLA-B*27:05 |
| 3748 | MAGEA10 | ENSG00000124260 | KVTDLVQFL | 2064 | HLA-B*58:01 |
| 3749 | MAGEA10 | ENSG00000124260 | KVTDLVQF | 2065 | HLA-A*32:01 |
| 3750 | MAGEA10 | ENSG00000124260 | LEGAQAPLAV | 2066 | HLA-B*49:01 |
| 3751 | MAGEA10 | ENSG00000124260 | LEGAQAPLA | 2067 | HLA-B*49:01 |
| 3752 | MAGEA10 | ENSG00000124260 | LEGAQAPL | 2068 | HLA-B*18:01 |
| 3753 | MAGEA10 | ENSG00000124260 | LESVIRNY | 2069 | HLA-B*I8:01 |
| 3754 | MAGEA10 | ENSG00000124260 | LESVIRNY | 2069 | HLA-B*37:01 |
| 3755 | MAGEA10 | ENSG00000124260 | LESVIRNY | 2069 | HLA-B*44:02 |
| 3756 | MAGEA10 | ENSG00000124260 | LESVIRNY | 2069 | HLA-B*44:03 |
| 3757 | MAGEA10 | ENSG00000124260 | LESVIRNY | 2069 | HLA-C*02:02 |
| 3758 | MAGEA10 | ENSG00000124260 | LESVIRNY | 2069 | HLA-C*16:01 |
| 3759 | MAGEA10 | ENSG00000124260 | LESVIRNY | 2069 | HLA-C*16:04 |
| 3760 | MAGEA10 | ENSG00000124260 | LFSEASECM | 2070 | HLA-C*14:02 |
| 3761 | MAGEA10 | ENSG00000124260 | LIPSTPEEV | 2071 | HLA-A*02:01 |
| 3762 | MAGEA10 | ENSG00000124260 | LIPSTPEEV | 2071 | HLA-A*02:07 |
| 3763 | MAGEA10 | ENSG00000124260 | LIYGEPRKL | 2072 | HLA-A*03:01 |
| 3764 | MAGEA10 | ENSG00000124260 | LLFSEASECML | 2073 | HLA-A*02:01 |
| 3765 | MAGEA10 | ENSG00000124260 | LLFSEASEC | 2074 | HLA-A*02:01 |
| 3766 | MAGEA10 | ENSG00000124260 | LQSQSETQGL | 2075 | HLA-B*27:05 |
| 3767 | MAGEA10 | ENSG00000124260 | LQSQSETQGL | 2075 | HLA-B*38:01 |
| 3768 | MAGEA10 | ENSG00000124260 | LQSQSETQGL | 2075 | HLA-B*39:01 |
| 3769 | MAGEA10 | ENSG00000124260 | LQVLPDSESL | 2076 | HLA-B*39:01 |
| 3770 | MAGEA10 | ENSG00000124260 | LSDVQSMPK | 2077 | HLA-A*01:01 |
| 3771 | MAGEA10 | ENSG00000124260 | LSDVQSMPK | 2077 | HLA-A*03:01 |
| 3772 | MAGEA10 | ENSG00000124260 | LSDVQSMPK | 2077 | HLA-A*03:02 |
| 3773 | MAGEA10 | ENSG00000124260 | LSDVQSMPK | 2077 | HLA-A*11:01 |
| 3774 | MAGEA10 | ENSG00000124260 | LSDVQSMPK | 2077 | HLA-B*27:02 |
| 3775 | MAGEA10 | ENSG00000124260 | LSIVFIEGY | 2078 | HLA-A*01:01 |
| 3776 | MAGEA10 | ENSG00000124260 | LSIVFIEGY | 2078 | HLA-A*30:02 |
| 3777 | MAGEA10 | ENSG00000124260 | LSIVFIEGY | 2078 | HLA-B*46:01 |
| 3778 | MAGEA10 | ENSG00000124260 | LSIVFIEGY | 2078 | HLA-B*57:01 |
| 3779 | MAGEA10 | ENSG00000124260 | LTQDWVQENYL | 2079 | HLA-C*04:01 |
| 3780 | MAGEA10 | ENSG00000124260 | LTQDWVQENY | 2080 | HLA-A*01:01 |
| 3781 | MAGEA10 | ENSG00000124260 | LTQDWVQENY | 2080 | HLA-A*29:02 |
| 3782 | MAGEA10 | ENSG00000124260 | LTQDWVQENY | 2080 | HLA-A*30:02 |
| 3783 | MAGEA10 | ENSG00000124260 | LTQDWVQENY | 2080 | HLA-A*32:01 |
| 3784 | MAGEA10 | ENSG00000124260 | LTQDWVQENY | 2080 | HLA-B*57:01 |
| 3785 | MAGEA10 | ENSG00000124260 | LTQDWVQENY | 2080 | HLA-B*58:01 |
| 3786 | MAGEA10 | ENSG00000124260 | LTYDGMLSDV | 2081 | HLA-A*02:03 |
| 3787 | MAGEA10 | ENSG00000124260 | LTYDGMLSDV | 2081 | HLA-A*68:02 |
| 3788 | MAGEA10 | ENSG00000124260 | LVFGEDVKEV | 2082 | HLA-A*02:03 |
| 3789 | MAGEA10 | ENSG00000124260 | LVFGIDVKEV | 2082 | HLA-A*68:02 |
| 3790 | MAGEA10 | ENSG00000124260 | LVFGIDVK | 2083 | HLA-B*27:02 |
| 3791 | MAGEA10 | ENSG00000124260 | LVQFLLFKY | 2084 | HLA-A*29:02 |
| 3792 | MAGEA10 | ENSG00000124260 | LVTSLGLTY | 2085 | HLA-A*01:01 |
| 3793 | MAGEA10 | ENSG00000124260 | LVTSLGLTY | 2085 | HLA-A*03:01 |
| 3794 | MAGEA10 | ENSG00000124260 | LVTSLGLTY | 2085 | HLA-A*25:01 |
| 3795 | MAGEA10 | ENSG00000124260 | LVTSLGLTY | 2085 | HLA-A*26:01 |
| 3796 | MAGEA10 | ENSG00000124260 | LVTSLGLTY | 2085 | HLA-A*29:02 |
| 3797 | MAGEA10 | ENSG00000124260 | LVTSLGLTY | 2085 | HLA-A*30:02 |
| 3798 | MAGEA10 | ENSG00000124260 | LVTSLGLTY | 2085 | HLA-A*32:01 |
| 3799 | MAGEA10 | ENSG00000124260 | LVTSLGLTY | 2085 | HLA-B*15:01 |
| 3800 | MAGEA10 | ENSG00000124260 | LVTSLGLTY | 2085 | HLA-B*15:03 |
| 3801 | MAGEA10 | ENSG00000124260 | LVTSLGLTY | 2085 | HLA-B*18:01 |
| 3802 | MAGEA10 | ENSG00000124260 | LVTSLGLTY | 2085 | HLA-B*35:01 |
| 3803 | MAGEA10 | ENSG00000124260 | LVTSLGLTY | 2085 | HLA-B*46:01 |
| 3804 | MAGEA10 | ENSG00000124260 | LVTSLGLTY | 2085 | HLA-B*58:01 |
| 3805 | MAGEA10 | ENSG00000124260 | LVTSLGLTY | 2085 | HLA-C*02:02 |
| 3806 | MAGEA10 | ENSG00000124260 | LVTSLGLTY | 2085 | HLA-C*07:04 |
| 3807 | MAGEA10 | ENSG00000124260 | LVTSLGLTY | 2085 | HLA-C*14:02 |
| 3808 | MAGEA10 | ENSG00000124260 | LVTSLGLTY | 2085 | HLA-C*16:01 |
| 3809 | MAGEA10 | ENSG00000124260 | LVTSLGLTY | 2085 | HLA-C*16:02 |
| 3810 | MAGEA10 | ENSG00000124260 | LVTSLGLTY | 2085 | HLA-C*16:04 |
| 3811 | MAGEA10 | ENSG00000124260 | LYDGMEHLIY | 2086 | HLA-A*29:02 |
| 3812 | MAGEA10 | ENSG00000124260 | LYDGMEHLIY | 2086 | HLA-C*07:01 |
| 3813 | MAGEA10 | ENSG00000124260 | LYDGMEHLI | 2087 | HLA-A*02:07 |
| 3814 | MAGEA10 | ENSG00000124260 | LYDGMEHLI | 2087 | HLA-A*23:01 |
| 3815 | MAGEA10 | ENSG00000124260 | LYDGMEHLI | 2087 | HLA-A*24:02 |
| 3816 | MAGEA10 | ENSG00000124260 | LYDGMEHLI | 2087 | HLA-B*35:01 |
| 3817 | MAGEA10 | ENSG00000124260 | LYDGMEHLI | 2087 | HLA-B*35:03 |
| 3818 | MAGEA10 | ENSG00000124260 | LYDGMEHLI | 2087 | HLA-B*38:01 |
| 3819 | MAGEA10 | ENSG00000124260 | LYDGMEHLI | 2087 | HLA-C*04:01 |
| 3820 | MAGEA10 | ENSG00000124260 | LYDGMEHL | 2088 | HLA-C*04:01 |
| 3821 | MAGEA10 | ENSG00000124260 | MASASSSAT | 2089 | HLA-C*03:04 |
| 3822 | MAGEA10 | ENSG00000124260 | MASASSSA | 2090 | HLA-B*54:01 |
| 3823 | MAGEA10 | ENSG00000124260 | MEHLIYGEP | 2091 | HLA-B*40:02 |
| 3824 | MAGEA10 | ENSG00000124260 | MLLVFGIDV | 2092 | HLA-A*02:01 |
| 3825 | MAGEA10 | ENSG00000124260 | MLLVFGIDV | 2092 | HLA-A*02:04 |
| 3826 | MAGEA10 | ENSG00000124260 | MLSDVQSMPKT | 2093 | HLA-C*06:02 |
| 3827 | MAGEA10 | ENSG00000124260 | MLSDVQSMPK | 2094 | HLA-A*01:01 |
| 3828 | MAGEA10 | ENSG00000124260 | MLSDVQSMPK | 2094 | HLA-A*03:01 |
| 3829 | MAGEA10 | ENSG00000124260 | MLSDVQSMPK | 2094 | HLA-A*03:02 |
| 3830 | MAGEA10 | ENSG00000124260 | MLSDVQSMPK | 2094 | HLA-A*11:01 |
| 3831 | MAGEA10 | ENSG00000124260 | MLSDVQSMPK | 2094 | HLA-A*68:01 |
| 3832 | MAGEA10 | ENSG00000124260 | MLSDVQSMPK | 2094 | HLA-B*27:02 |
| 3833 | MAGEA10 | ENSG00000124260 | MLSDVQSMPK | 2094 | HLA-B*27:05 |
| 3834 | MAGEA10 | ENSG00000124260 | MLSDVQSMPK | 2094 | HLA-C*04:01 |
| 3835 | MAGEA10 | ENSG00000124260 | MLSDVQSMPK | 2094 | HLA-C*06:02 |
| 3836 | MAGEA10 | ENSG00000124260 | MLSDVQSMPK | 2094 | HLA-C*07:01 |
| 3837 | MAGEA10 | ENSG00000124260 | MLSDVQSMPK | 2094 | HLA-C*07:06 |
| 3838 | MAGEA10 | ENSG00000124260 | MLSDVQSM | 2095 | HLA-B*37:01 |
| 3839 | MAGEA10 | ENSG00000124260 | MPEEDLQSQ | 2096 | HLA-B*35:01 |
| 3840 | MAGEA10 | ENSG00000124260 | MPEEDLQSQ | 2096 | HLA-B*35:03 |
| 3841 | MAGEA10 | ENSG00000124260 | MPEEDLQSQ | 2096 | HLA-B*55:01 |
| 3842 | MAGEA10 | ENSG00000124260 | MPEEDLQSQ | 2096 | HLA-C*03:03 |
| 3843 | MAGEA10 | ENSG00000124260 | MPKTGILIL | 2097 | HLA-B*07:02 |
| 3844 | MAGEA10 | ENSG00000124260 | MPKTGILIL | 2097 | HLA-B*08:01 |
| 3845 | MAGEA10 | ENSG00000124260 | MPKTGILIL | 2097 | HLA-B*35:01 |
| 3846 | MAGEA10 | ENSG00000124260 | MPKTGILIL | 2097 | HLA-B*35:03 |
| 3847 | MAGEA10 | ENSG00000124260 | MPKTGILIL | 2097 | HLA-B*51:01 |
| 3848 | MAGEA10 | ENSG00000124260 | MPKTGILIL | 2097 | HLA-B*54:01 |
| 3849 | MAGEA10 | ENSG00000124260 | MPKTGILIL | 2097 | HLA-C*07:02 |
| 3850 | MAGEA10 | ENSG00000124260 | MPKTGILI | 2098 | HLA-B*08:01 |
| 3851 | MAGEA10 | ENSG00000124260 | MPKTGILI | 2098 | HLA-B*51:01 |
| 3852 | MAGEA10 | ENSG00000124260 | MPKTGILI | 2098 | HLA-B*54:01 |
| 3853 | MAGEA10 | ENSG00000124260 | NGSDPRSFPL | 2099 | HLA-C*16:01 |
| 3854 | MAGEA10 | ENSG00000124260 | NGSDPRSF | 2100 | HLA-C*16:01 |
| 3855 | MAGEA10 | ENSG00000124260 | NPPQSAQI | 2101 | HLA-B*51:01 |
| 3856 | MAGEA10 | ENSG00000124260 | NYEDHFPLLF | 2102 | HLA-A*24:02 |
| 3857 | MAGEA10 | ENSG00000124260 | NYEDHFPLLF | 2102 | HLA-A*29:02 |
| 3858 | MAGEA10 | ENSG00000124260 | NYEDHFPLL | 2103 | HLA-A*23:01 |
| 3859 | MAGEA10 | ENSG00000124260 | NYEDHFPLL | 2103 | HLA-A*24:02 |
| 3860 | MAGEA10 | ENSG00000124260 | PDSESLPR | 2104 | HLA-B*27:02 |
| 3861 | MAGEA10 | ENSG00000124260 | PLIPSTPEEV | 2105 | HLA-A*02:03 |
| 3862 | MAGEA10 | ENSG00000124260 | QDWVQENYL | 2106 | HLA-A*30:01 |
| 3863 | MAGEA10 | ENSG00000124260 | QIACSSPSV | 2107 | HLA-A*02:01 |
| 3864 | MAGEA10 | ENSG00000124260 | QKEESPSTL | 2108 | HLA-B*39:01 |
| 3865 | MAGEA10 | ENSG00000124260 | QMKEPITKA | 2109 | HLA-A*02:03 |
| 3866 | MAGEA10 | ENSG00000124260 | QMKEPITKA | 2109 | HLA-B*55:01 |
| 3867 | MAGEA10 | ENSG00000124260 | QSDEGSSSQK | 2110 | HLA-A*01:01 |
| 3868 | MAGEA10 | ENSG00000124260 | QSDEGSSSQ | 2111 | HLA-C*05:01 |
| 3869 | MAGEA10 | ENSG00000124260 | QSNIPKTGIL | 2112 | HLA-B*08:01 |
| 3870 | MAGEA10 | ENSG00000124260 | QSNIPKTGIL | 2112 | HLA-B*58:01 |
| 3871 | MAGEA10 | ENSG00000124260 | QSNPKTGI | 2113 | HLA-B*08:01 |
| 3872 | MAGEA10 | ENSG00000124260 | QVLPDSESLPR | 2114 | HLA-A*03:01 |
| 3873 | MAGEA10 | ENSG00000124260 | QVLPDSESLPR | 2114 | HLA-A*11:01 |
| 3874 | MAGEA10 | ENSG00000124260 | QVLPDSESLPR | 2114 | HLA-A*31:01 |
| 3875 | MAGEA10 | ENSG00000124260 | QVLPDSESLPR | 2114 | HLA-A*33:01 |
| 3876 | MAGEA10 | ENSG00000124260 | QVLPDSESLPR | 2114 | HLA-A*33:03 |
| 3877 | MAGEA10 | ENSG00000124260 | QVLPDSESLPR | 2114 | HLA-A*68:01 |
| 3878 | MAGEA10 | ENSG00000124260 | QVLPDSESLPR | 2114 | HLA-B*27:02 |
| 3879 | MAGEA10 | ENSG00000124260 | QVLPDSESLPR | 2114 | HLA-C*07:06 |
| 3880 | MAGEA10 | ENSG00000124260 | QVLPDSESL | 2115 | HLA-B*15:01 |
| 3881 | MAGEA10 | ENSG00000124260 | QVLPDSESL | 2115 | HLA-B*35:01 |
| 3882 | MAGEA10 | ENSG00000124260 | QVLPDSESL | 2115 | HLA-B*35:03 |
| 3883 | MAGEA10 | ENSG00000124260 | QVLPDSESL | 2115 | HLA-B*38:01 |
| 3884 | MAGEA10 | ENSG00000124260 | QVLPDSESL | 2115 | HLA-B*39:01 |
| 3885 | MAGEA10 | ENSG00000124260 | QVLPDSESL | 2115 | HLA-C*01:02 |
| 3886 | MAGEA10 | ENSG00000124260 | QVLPDSESL | 2115 | HLA-C*03:03 |
| 3887 | MAGEA10 | ENSG00000124260 | QVLPDSESL | 2115 | HLA-C*03:04 |
| 3888 | MAGEA10 | ENSG00000124260 | QVPGSDPARY | 2116 | HLA-A*01:01 |
| 3889 | MAGEA10 | ENSG00000124260 | QVPGSDPARY | 2116 | HLA-A*25:01 |
| 3890 | MAGEA10 | ENSG00000124260 | QVPGSDPARY | 2116 | HLA-A*26:01 |
| 3891 | MAGEA10 | ENSG00000124260 | QVPGSDPARY | 2116 | HLA-A*29:02 |
| 3892 | MAGEA10 | ENSG00000124260 | QVPGSDPARY | 2116 | HLA-A*30:02 |
| 3893 | MAGEA10 | ENSG00000124260 | QVPGSDPARY | 2116 | HLA-C*07:04 |
| 3894 | MAGEA10 | ENSG00000124260 | RIATTDDTTAM | 2117 | HLA-B*15:01 |
| 3895 | MAGEA10 | ENSG00000124260 | RNYEDHFPLLF | 2118 | HLA-B*57:01 |
| 3896 | MAGEA10 | ENSG00000124260 | RQVPGSDPARY | 65 | HLA-A*29:02 |
| 3897 | MAGEA10 | ENSG00000124260 | RQVPGSDPARY | 65 | HLA-A*30:02 |
| 3898 | MAGEA10 | ENSG00000124260 | RQVPGSDPARY | 65 | HLA-A*32:01 |
| 3899 | MAGEA10 | ENSG00000124260 | RQVPGSDPARY | 65 | HLA-B*15:01 |
| 3900 | MAGEA10 | ENSG00000124260 | RQVPGSDPARY | 65 | HLA-B*15:03 |
| 3901 | MAGEA10 | ENSG00000124260 | RQVPGSDPARY | 65 | HLA-B*57:01 |
| 3902 | MAGEA10 | ENSG00000124260 | RQVPGSDPARY | 65 | HLA-B*58:01 |
| 3903 | MAGEA10 | ENSG00000124260 | SASSSATGSF | 2119 | HLA-A*25:01 |
| 3904 | MAGEA10 | ENSG00000124260 | SASSSATGSF | 2119 | HLA-A*26:01 |
| 3905 | MAGEA10 | ENSG00000124260 | SASSSATGSF | 2119 | HLA-A*30:02 |
| 3906 | MAGEA10 | ENSG00000124260 | SASSSATGSF | 2119 | HLA-B*07:02 |
| 3907 | MAGEA10 | ENSG00000124260 | SASSSATGSF | 2119 | HLA-C*03:04 |
| 3908 | MAGEA10 | ENSG00000124260 | SATGSFSYP | 2120 | HLA-C*16:02 |
| 3909 | MAGEA10 | ENSG00000124260 | SATGSFSY | 2121 | HLA-A*30:02 |
| 3910 | MAGEA10 | ENSG00000124260 | SATGSFSY | 2121 | HLA-B*15:01 |
| 3911 | MAGEA10 | ENSG00000124260 | SATGSFSY | 2121 | HLA-B*15:03 |
| 3912 | MAGEA10 | ENSG00000124260 | SATGSFSY | 2121 | HLA-B*35:01 |
| 3913 | MAGEA10 | ENSG00000124260 | SATGSFSY | 2121 | HLA-B*39:01 |
| 3914 | MAGEA10 | ENSG00000124260 | SATGSFSY | 2121 | HLA-B*58:01 |
| 3915 | MAGEA10 | ENSG00000124260 | SATGSFSY | 2121 | HLA-C*16:01 |
| 3916 | MAGEA10 | ENSG00000124260 | SATGSFSY | 2121 | HLA-C*16:02 |
| 3917 | MAGEA10 | ENSG00000124260 | SDPARYEF | 2122 | HLA-B*37:01 |
| 3918 | MAGEA10 | ENSG00000124260 | SDPRSFPLW | 2123 | HLA-A*24:02 |
| 3919 | MAGEA10 | ENSG00000124260 | SDVQSMPK | 2124 | HLA-C*06:02 |
| 3920 | MAGEA10 | ENSG00000124260 | SEASECMLLV | 2125 | HLA-B*49:01 |
| 3921 | MAGEA10 | ENSG00000124260 | SEASECMLL | 2126 | HLA-A*30:01 |
| 3922 | MAGEA10 | ENSG00000124260 | SEASECMLL | 2126 | HLA-B*40:01 |
| 3923 | MAGEA10 | ENSG00000124260 | SEASECMLL | 2126 | HLA-B*44:03 |
| 3924 | MAGEA10 | ENSG00000124260 | SEASECMLL | 2126 | HLA-B*49:01 |
| 3925 | MAGEA10 | ENSG00000124260 | SECMLLVF | 2127 | HLA-B*18:01 |
| 3926 | MAGEA10 | ENSG00000124260 | SEIDEKVTDLV | 2128 | HLA-B*49:01 |
| 3927 | MAGEA10 | ENSG00000124260 | SEIDEKVTDL | 2129 | HLA-A*30:01 |
| 3928 | MAGEA10 | ENSG00000124260 | SEIDEKVTDL | 2129 | HLA-B*40:01 |
| 3929 | MAGEA10 | ENSG00000124260 | SEIDEKVTDL | 2129 | HLA-B*40:02 |
| 3930 | MAGEA10 | ENSG00000124260 | SEIDEKVTDL | 2129 | HLA-B*44:02 |
| 3931 | MAGEA10 | ENSG00000124260 | SEIDEKVTDL | 2129 | HLA-B*44:03 |
| 3932 | MAGEA10 | ENSG00000124260 | SEIDEKVTDL | 2129 | HLA-B*49:01 |
| 3933 | MAGEA10 | ENSG00000124260 | SESLPRSEI | 2130 | HLA-B*37:01 |
| 3934 | MAGEA10 | ENSG00000124260 | SESLPRSEI | 2130 | HLA-B*40:01 |
| 3935 | MAGEA10 | ENSG00000124260 | SESLPRSEI | 2130 | HLA-B*44:02 |
| 3936 | MAGEA10 | ENSG00000124260 | SESLPRSEI | 2130 | HLA-B*44:03 |
| 3937 | MAGEA10 | ENSG00000124260 | SESLPRSEI | 2130 | HLA-B*49:01 |
| 3938 | MAGEA10 | ENSG00000124260 | SFVLVTSL | 2131 | HLA-A*23:01 |
| 3939 | MAGEA10 | ENSG00000124260 | SFVLVTSL | 2131 | HLA-C*14:02 |
| 3940 | MAGEA10 | ENSG00000124260 | SIVFIEGY | 2132 | HLA-B*15:01 |
| 3941 | MAGEA10 | ENSG00000124260 | SLLKFLAKV | 2133 | HLA-A*02:01 |
| 3942 | MAGEA10 | ENSG00000124260 | SLLKFLAKV | 2133 | HLA-A*02:03 |
| 3943 | MAGEA10 | ENSG00000124260 | SLLKFLAKV | 2133 | HLA-A*02:04 |
| 3944 | MAGEA10 | ENSG00000124260 | SLLKFLAKV | 2133 | HLA-A*02:07 |
| 3945 | MAGEA10 | ENSG00000124260 | SLLKFLAK | 2134 | HLA-A*03:01 |
| 3946 | MAGEA10 | ENSG00000124260 | SPSTLQVL | 2135 | HLA-B*07:02 |
| 3947 | MAGEA10 | ENSG00000124260 | SPSVVASLPL | 2136 | HLA-B*07:02 |
| 3948 | MAGEA10 | ENSG00000124260 | SPSVVASLPL | 2136 | HLA-C*07:02 |
| 3949 | MAGEA10 | ENSG00000124260 | SPSVVASL | 2137 | HLA-B*07:02 |
| 3950 | MAGEA10 | ENSG00000124260 | SPSVVASL | 2137 | HLA-B*08:01 |
| 3951 | MAGEA10 | ENSG00000124260 | SPSVVASL | 2137 | HLA-B*37:01 |
| 3952 | MAGEA10 | ENSG00000124260 | SPSVVASL | 2137 | HLA-B*56:01 |
| 3953 | MAGEA10 | ENSG00000124260 | SPSVVASL | 2137 | HLA-C*07:02 |
| 3954 | MAGEA10 | ENSG00000124260 | SQKEESPSTL | 2138 | HLA-B*15:01 |
| 3955 | MAGEA10 | ENSG00000124260 | SSATGSFSY | 2139 | HLA-A*01:01 |
| 3956 | MAGEA10 | ENSG00000124260 | SSATGSFSY | 2139 | HLA-A*11:01 |
| 3957 | MAGEA10 | ENSG00000124260 | SSATGSFSY | 2139 | HLA-A*25:01 |
| 3958 | MAGEA10 | ENSG00000124260 | SSATGSFSY | 2139 | HLA-A*26:01 |
| 3959 | MAGEA10 | ENSG00000124260 | SSATGSFSY | 2139 | HLA-A*29:02 |
| 3960 | MAGEA10 | ENSG00000124260 | SSATGSFSY | 2139 | HLA-A*30:02 |
| 3961 | MAGEA10 | ENSG00000124260 | SSATGSFSY | 2139 | HLA-A*32:01 |
| 3962 | MAGEA10 | ENSG00000124260 | SSATGSFSY | 2139 | HLA-B*15:01 |
| 3963 | MAGEA10 | ENSG00000124260 | SSATGSFSY | 2139 | HLA-B*15:03 |
| 3964 | MAGEA10 | ENSG00000124260 | SSATGSFSY | 2139 | HLA-B*27:05 |
| 3965 | MAGEA10 | ENSG00000124260 | SSATGSFSY | 2139 | HLA-B*35:01 |
| 3966 | MAGEA10 | ENSG00000124260 | SSATGSFSY | 2139 | HLA-B*46:01 |
| 3967 | MAGEA10 | ENSG00000124260 | SSATGSFSY | 2139 | HLA-B*58:01 |
| 3968 | MAGEA10 | ENSG00000124260 | SSATGSFSY | 2139 | HLA-C*02:02 |
| 3969 | MAGEA10 | ENSG00000124260 | SSATGSFSY | 2139 | HLA-C*07:01 |
| 3970 | MAGEA10 | ENSG00000124260 | SSATGSFSY | 2139 | HLA-C*07:06 |
| 3971 | MAGEA10 | ENSG00000124260 | SSATGSFSY | 2139 | HLA-C*16:01 |
| 3972 | MAGEA10 | ENSG00000124260 | SSATGSFSY | 2139 | HLA-C*16:02 |
| 3973 | MAGEA10 | ENSG00000124260 | SSATGSFSY | 2139 | HLA-C*16:04 |
| 3974 | MAGEA10 | ENSG00000124260 | SSPSVVASL | 66 | HLA-A*02:07 |
| 3975 | MAGEA10 | ENSG00000124260 | SSPSVVASL | 66 | HLA-A*24:02 |
| 3976 | MAGEA10 | ENSG00000124260 | SSPSVVASL | 66 | HLA-A*25:01 |
| 3977 | MAGEA10 | ENSG00000124260 | SSPSVVASL | 66 | HLA-A*26:01 |
| 3978 | MAGEA10 | ENSG00000124260 | SSPSVVASL | 66 | HLA-B*46:01 |
| 3979 | MAGEA10 | ENSG00000124260 | SSPSVVASL | 66 | HLA-B*58:01 |
| 3980 | MAGEA10 | ENSG00000124260 | SSPSVVASL | 66 | HLA-C*01:02 |
| 3981 | MAGEA10 | ENSG00000124260 | SSPSVVASL | 66 | HLA-C*03:03 |
| 3982 | MAGEA10 | ENSG00000124260 | SSPSVVASL | 66 | HLA-C*03:04 |
| 3983 | MAGEA10 | ENSG00000124260 | SSPSVVASL | 66 | HLA-C*14:02 |
| 3984 | MAGEA10 | ENSG00000124260 | SSSATGSFSY | 2140 | HLA-A*01:01 |
| 3985 | MAGEA10 | ENSG00000124260 | SSSATGSFSY | 2140 | HLA-A*29:02 |
| 3986 | MAGEA10 | ENSG00000124260 | SSSATGSFSY | 2140 | HLA-A*30:02 |
| 3987 | MAGEA10 | ENSG00000124260 | SSSATGSF | 2141 | HLA-C*05:01 |
| 3988 | MAGEA10 | ENSG00000124260 | SSSFPSSF | 2142 | HLA-B*37:01 |
| 3989 | MAGEA10 | ENSG00000124260 | SSSSSSCY | 2143 | HLA-A*30:02 |
| 3990 | MAGEA10 | ENSG00000124260 | SSSSSSSCY | 2144 | HLA-A*01:01 |
| 3991 | MAGEA10 | ENSG00000124260 | SSSSSSSCY | 2144 | HLA-A*26:01 |
| 3992 | MAGEA10 | ENSG00000124260 | SSSSSSSCY | 2144 | HLA-A*30:02 |
| 3993 | MAGEA10 | ENSG00000124260 | SSSSSSSCY | 2144 | HLA-B*15:01 |
| 3994 | MAGEA10 | ENSG00000124260 | SSSSSSSCY | 2144 | HLA-B*15:03 |
| 3995 | MAGEA10 | ENSG00000124260 | SSSSSSSCY | 2144 | HLA-C*07:04 |
| 3996 | MAGEA10 | ENSG00000124260 | SSSSSSSCY | 2144 | HLA-C*16:01 |
| 3997 | MAGEA10 | ENSG00000124260 | SSSSSSSSCY | 2145 | HLA-A*30:02 |
| 3998 | MAGEA10 | ENSG00000124260 | SSSSSSSSSCY | 2146 | HLA-A*30:02 |
| 3999 | MAGEA10 | ENSG00000124260 | SSTSTSSSF | 2147 | HLA-A*25:01 |
| 4000 | MAGEA10 | ENSG00000124260 | SSTSTSSSF | 2147 | HLA-A*26:01 |
| 4001 | MAGEA10 | ENSG00000124260 | SSTSTSSSF | 2147 | HLA-A*30:02 |
| 4002 | MAGEA10 | ENSG00000124260 | SSTSTSSSF | 2147 | HLA-A*32:01 |
| 4003 | MAGEA10 | ENSG00000124260 | SSTSTSSSF | 2147 | HLA-B*15:01 |
| 4004 | MAGEA10 | ENSG00000124260 | SSTSTSSSF | 2147 | HLA-B*15:03 |
| 4005 | MAGEA10 | ENSG00000124260 | SSTSTSSSF | 2147 | HLA-B*46:01 |
| 4006 | MAGEA10 | ENSG00000124260 | SSTSTSSSF | 2147 | HLA-B*58:01 |
| 4007 | MAGEA10 | ENSG00000124260 | SSTSTSSSF | 2147 | HLA-C*02:02 |
| 4008 | MAGEA10 | ENSG00000124260 | SSTSTSSSF | 2147 | HLA-C*03:03 |
| 4009 | MAGEA10 | ENSG00000124260 | SSTSTSSSF | 2147 | HLA-C*03:04 |
| 4010 | MAGEA10 | ENSG00000124260 | SSTSTSSSF | 2147 | HLA-C*14:02 |
| 4011 | MAGEA10 | ENSG00000124260 | SSTSTSSSF | 2147 | HLA-C*16:01 |
| 4012 | MAGEA10 | ENSG00000124260 | SSTSTSSSF | 2147 | HLA-C*16:02 |
| 4013 | MAGEA10 | ENSG00000124260 | SSTSTSSSF | 2147 | HLA-C*16:04 |
| 4014 | MAGEA10 | ENSG00000124260 | STSSSFPSSF | 2148 | HLA-A*25:01 |
| 4015 | MAGEA10 | ENSG00000124260 | STSSSFPSSF | 2148 | HLA-A*26:01 |
| 4016 | MAGEA10 | ENSG00000124260 | STSTSSSF | 2149 | HLA-C*05:01 |
| 4017 | MAGEA10 | ENSG00000124260 | TAMASASSSA | 2150 | HLA-B*54:01 |
| 4018 | MAGEA10 | ENSG00000124260 | TAMASASSSA | 2150 | HLA-B*56:01 |
| 4019 | MAGEA10 | ENSG00000124260 | TDLVQFLL | 2151 | HLA-B*37:01 |
| 4020 | MAGEA10 | ENSG00000124260 | TKAEILESV | 2152 | HLA-A*68:02 |
| 4021 | MAGEA10 | ENSG00000124260 | TPEEVIWEAL | 2153 | HLA-B*35:03 |
| 4022 | MAGEA10 | ENSG00000124260 | TPEEVIWEA | 2154 | HLA-B*35:03 |
| 4023 | MAGEA10 | ENSG00000124260 | TPEEVIWEA | 2154 | HLA-B*54:01 |
| 4024 | MAGEA10 | ENSG00000124260 | TPEEVIWEA | 2154 | HLA-B*56:01 |
| 4025 | MAGEA10 | ENSG00000124260 | TPNPPQSAQIA | 2155 | HLA-B*54:01 |
| 4026 | MAGEA10 | ENSG00000124260 | TPNPPQSAQIA | 2155 | HLA-B*56:01 |
| 4027 | MAGEA10 | ENSG00000124260 | TPNPPQSAQI | 2156 | HLA-B*07:02 |
| 4028 | MAGEA10 | ENSG00000124260 | TPNPPQSAQI | 2156 | HLA-B*51:01 |
| 4029 | MAGEA10 | ENSG00000124260 | TPNPPQSAQI | 2156 | HLA-B*56:01 |
| 4030 | MAGEA10 | ENSG00000124260 | TPNPPQSAQI | 2156 | HLA-C*07:02 |
| 4031 | MAGEA10 | ENSG00000124260 | TPNPPQSA | 2157 | HLA-B*56:01 |
| 4032 | MAGEA10 | ENSG00000124260 | TQDWVQENYL | 2158 | HLA-B*38:01 |
| 4033 | MAGEA10 | ENSG00000124260 | TQDWVQENYL | 2158 | HLA-C*05:01 |
| 4034 | MAGEA10 | ENSG00000124260 | TQDWVQENY | 2159 | HLA-A*01:01 |
| 4035 | MAGEA10 | ENSG00000124260 | TQDWVQENY | 2159 | HLA-A*30:02 |
| 4036 | MAGEA10 | ENSG00000124260 | TQDWVQENY | 2159 | HLA-B*15:01 |
| 4037 | MAGEA10 | ENSG00000124260 | TQDWVQENY | 2159 | HLA-B*38:01 |
| 4038 | MAGEA10 | ENSG00000124260 | TQGLEGAQAPL | 2160 | HLA-B*27:05 |
| 4039 | MAGEA10 | ENSG00000124260 | TQGLEGAQAPL | 2160 | HLA-B*38:01 |
| 4040 | MAGEA10 | ENSG00000124260 | TQGLEGAQAPL | 2160 | HLA-B*39:01 |
| 4041 | MAGEA10 | ENSG00000124260 | TSSSFPSSF | 2161 | HLA-A*25:01 |
| 4042 | MAGEA10 | ENSG00000124260 | TSSSFPSSF | 2161 | HLA-A*26:01 |
| 4043 | MAGEA10 | ENSG00000124260 | TSSSFPSSF | 2161 | HLA-A*30:02 |
| 4044 | MAGEA10 | ENSG00000124260 | TSSSFPSSF | 2161 | HLA-A*32:01 |
| 4045 | MAGEA10 | ENSG00000124260 | TSSSFPSSF | 2161 | HLA-B*37:01 |
| 4046 | MAGEA10 | ENSG00000124260 | TSSSFPSSF | 2161 | HLA-C*02:02 |
| 4047 | MAGEA10 | ENSG00000124260 | TSSSFPSSF | 2161 | HLA-C*16:01 |
| 4048 | MAGEA10 | ENSG00000124260 | TSSSFPSSF | 2161 | HLA-C*16:04 |
| 4049 | MAGEA10 | ENSG00000124260 | TTDDTTAMA | 2162 | HLA-A*01:01 |
| 4050 | MAGEA10 | ENSG00000124260 | TTDDTTAMA | 2162 | HLA-C*05:01 |
| 4051 | MAGEA10 | ENSG00000124260 | TTDDTTAM | 2163 | HLA-B*35:03 |
| 4052 | MAGEA10 | ENSG00000124260 | TTDDTTAM | 2163 | HLA-C*04:01 |
| 4053 | MAGEA10 | ENSG00000124260 | TTDDTTAM | 2163 | HLA-C*05:01 |
| 4054 | MAGEA10 | ENSG00000124260 | TTDDTTAM | 2163 | HLA-C*07:04 |
| 4055 | MAGEA10 | ENSG00000124260 | TYDGMLSDVQS | 2164 | HLA-C*04:01 |
| 4056 | MAGEA10 | ENSG00000124260 | TYDGMLSDV | 226 | HLA-B*35:01 |
| 4057 | MAGEA10 | ENSG00000124260 | TYDGMLSDV | 226 | HLA-B*35:03 |
| 4058 | MAGEA10 | ENSG00000124260 | TYDGMLSDV | 226 | HLA-C*04:01 |
| 4059 | MAGEA10 | ENSG00000124260 | TYDGMLSDV | 226 | HLA-C*05:01 |
| 4060 | MAGEA10 | ENSG00000124260 | TYDGMLSDV | 226 | HLA-C*07:04 |
| 4061 | MAGEA10 | ENSG00000124260 | VDPTGHSF | 2165 | HLA-B*37:01 |
| 4062 | MAGEA10 | ENSG00000124260 | VDPTGHSF | 2165 | HLA-C*01:02 |
| 4063 | MAGEA10 | ENSG00000124260 | VDPTGHSF | 2165 | HLA-C*04:01 |
| 4064 | MAGEA10 | ENSG00000124260 | VDPTGHSF | 2165 | HLA-C*07:01 |
| 4065 | MAGEA10 | ENSG00000124260 | VDPTGHSF | 2165 | HLA-C*14:02 |
| 4066 | MAGEA10 | ENSG00000124260 | VDPTGHSF | 2165 | HLA-C*16:01 |
| 4067 | MAGEA10 | ENSG00000124260 | VEEDASSSTST | 2166 | HLA-A*30:01 |
| 4068 | MAGEA10 | ENSG00000124260 | VKEVDPTGHSF | 2167 | HLA-B*15:03 |
| 4069 | MAGEA10 | ENSG00000124260 | VLPDSESLPRS | 2168 | HLA-A*02:07 |
| 4070 | MAGEA10 | ENSG00000124260 | VLPDSESL | 2169 | HLA-C*01:02 |
| 4071 | MAGEA10 | ENSG00000124260 | VLVTSLGLTY | 2170 | HLA-A*01:01 |
| 4072 | MAGEA10 | ENSG00000124260 | VLVTSLGLTY | 2170 | HLA-A*23:01 |
| 4073 | MAGEA10 | ENSG00000124260 | VLVTSLGLTY | 2170 | HLA-A*25:01 |
| 4074 | MAGEA10 | ENSG00000124260 | VLVTSLGLTY | 2170 | HLA-A*26:01 |
| 4075 | MAGEA10 | ENSG00000124260 | VLVTSLGLTY | 2170 | HLA-A*29:02 |
| 4076 | MAGEA10 | ENSG00000124260 | VLVTSLGLTY | 2170 | HLA-A*30:02 |
| 4077 | MAGEA10 | ENSG00000124260 | VLVTSLGLTY | 2170 | HLA-A*32:01 |
| 4078 | MAGEA10 | ENSG00000124260 | VLVTSLGLTY | 2170 | HLA-B*15:01 |
| 4079 | MAGEA10 | ENSG00000124260 | VLVTSLGLTY | 2170 | HLA-B*15:03 |
| 4080 | MAGEA10 | ENSG00000124260 | VLVTSLGLTY | 2170 | HLA-B*46:01 |
| 4081 | MAGEA10 | ENSG00000124260 | VLVTSLGLTY | 2170 | HLA-B*58:01 |
| 4082 | MAGEA10 | ENSG00000124260 | VLVTSLGLTY | 2170 | HLA-C*02:02 |
| 4083 | MAGEA10 | ENSG00000124260 | VLVTSLGLTY | 2170 | HLA-C*07:04 |
| 4084 | MAGEA10 | ENSG00000124260 | VNGSDPRSF | 2171 | HLA-C*16:01 |
| 4085 | MAGEA10 | ENSG00000124260 | VPGSDPARYEF | 2172 | HLA-B*35:01 |
| 4086 | MAGEA10 | ENSG00000124260 | VPGSDPARYEF | 2172 | HLA-B*55:01 |
| 4087 | MAGEA10 | ENSG00000124260 | VPGSDPARY | 2173 | HLA-A*30:02 |
| 4088 | MAGEA10 | ENSG00000124260 | VPGSDPARY | 2173 | HLA-B*35:01 |
| 4089 | MAGEA10 | ENSG00000124260 | VPGSDPARY | 2173 | HLA-B*55:01 |
| 4090 | MAGEA10 | ENSG00000124260 | VPGSDPARY | 2173 | HLA-C*03:03 |
| 4091 | MAGEA10 | ENSG00000124260 | VQENYLEY | 2174 | HLA-A*01:01 |
| 4092 | MAGEA10 | ENSG00000124260 | VQENYLEY | 2174 | HLA-B*39:01 |
| 4093 | MAGEA10 | ENSG00000124260 | VQSMPKTGI | 2175 | HLA-A*32:01 |
| 4094 | MAGEA10 | ENSG00000124260 | VQSMPKTGI | 2175 | HLA-B*13:02 |
| 4095 | MAGEA10 | ENSG00000124260 | VQSMPKTGI | 2175 | HLA-B*38:01 |
| 4096 | MAGEA10 | ENSG00000124260 | VQSMPKTGI | 2175 | HLA-C*06:02 |
| 4097 | MAGEA10 | ENSG00000124260 | VQSMPKTGI | 2175 | HLA-C*07:04 |
| 4098 | MAGEA10 | ENSG00000124260 | VTDLVQFLLF | 2176 | HLA-A*01:01 |
| 4099 | MAGEA10 | ENSG00000124260 | VTDLVQFLL | 2177 | HLA-A*01:01 |
| 4100 | MAGEA10 | ENSG00000124260 | VTDLVQFLL | 2177 | HLA-A*02:07 |
| 4101 | MAGEA10 | ENSG00000124260 | VTDLVQFL | 2178 | HLA-A*01:01 |
| 4102 | MAGEA10 | ENSG00000124260 | VTDLVQFL | 2178 | HLA-C*04:01 |
| 4103 | MAGEA10 | ENSG00000124260 | VTDLVQFL | 2178 | HLA-C*05:01 |
| 4104 | MAGEA10 | ENSG00000124260 | VTSLGLTY | 2179 | HLA-A*01:01 |
| 4105 | MAGEA10 | ENSG00000124260 | VTSLGLTY | 2179 | HLA-A*29:02 |
| 4106 | MAGEA10 | ENSG00000124260 | VTSLGLTY | 2179 | HLA-A*32:01 |
| 4107 | MAGEA10 | ENSG00000124260 | VTSLGLTY | 2179 | HLA-B*15:01 |
| 4108 | MAGEA10 | ENSG00000124260 | VTSLGLTY | 2179 | HLA-B*46:01 |
| 4109 | MAGEA10 | ENSG00000124260 | VTSLGLTY | 2179 | HLA-B*58:01 |
| 4110 | MAGEA10 | ENSG00000124260 | VTSLGLTY | 2179 | HLA-C*03:04 |
| 4111 | MAGEA10 | ENSG00000124260 | VTSLGLTY | 2179 | HLA-C*14:02 |
| 4112 | MAGEA10 | ENSG00000124260 | VTSLGLTY | 2179 | HLA-C*16:01 |
| 4113 | MAGEA10 | ENSG00000124260 | WVQENYLEY | 75 | HLA-A*01:01 |
| 4114 | MAGEA10 | ENSG00000124260 | WVQENYLEY | 75 | HLA-A*25:01 |
| 4115 | MAGEA10 | ENSG00000124260 | WVQENYLEY | 75 | HLA-A*26:01 |
| 4116 | MAGEA10 | ENSG00000124260 | WVQENYLEY | 75 | HLA-A*29:02 |
| 4117 | MAGEA10 | ENSG00000124260 | WVQENYLEY | 75 | HLA-A*30:02 |
| 4118 | MAGEA10 | ENSG00000124260 | WVQENYLEY | 75 | HLA-B*15:01 |
| 4119 | MAGEA10 | ENSG00000124260 | WVQENYLEY | 75 | HLA-B*35:01 |
| 4120 | MAGEA10 | ENSG00000124260 | WVQENYLEY | 75 | HLA-C*07:04 |
| 4121 | MAGEA10 | ENSG00000124260 | YDGMEHLI | 2180 | HLA-B*38:01 |
| 4122 | MAGEA10 | ENSG00000124260 | YDGMEHLI | 2180 | HLA-C*07:01 |
| 4123 | MAGEA10 | ENSG00000124260 | YDGMEHLI | 2180 | HLA-C*07:04 |
| 4124 | MAGEA10 | ENSG00000124260 | YEDHFPLLF | 2181 | HLA-A*01:01 |
| 4125 | MAGEA10 | ENSG00000124260 | YEDHFPLLF | 2181 | HLA-A*02:07 |
| 4126 | MAGEA10 | ENSG00000124260 | YEDHFPLLF | 2181 | HLA-A*24:02 |
| 4127 | MAGEA10 | ENSG00000124260 | YEDHFPLLF | 2181 | HLA-A*29:02 |
| 4128 | MAGEA10 | ENSG00000124260 | YEDHFPLLF | 2181 | HLA-B*18:01 |
| 4129 | MAGEA10 | ENSG00000124260 | YEDHFPLLF | 2181 | HLA-B*44:02 |
| 4130 | MAGEA10 | ENSG00000124260 | YEDHFPLLF | 2181 | HLA-B*44:03 |
| 4131 | MAGEA10 | ENSG00000124260 | YEDHFPLLF | 2181 | HLA-B*49:01 |
| 4132 | MAGEA10 | ENSG00000124260 | YEDHFPLLF | 2181 | HLA-B*57:01 |
| 4133 | MAGEA10 | ENSG00000124260 | YEDHFPLL | 2182 | HLA-B*18:01 |
| 4134 | MAGEA10 | ENSG00000124260 | YEDHFPLL | 2182 | HLA-B*49:01 |
| 4135 | MAGEA10 | ENSG00000124260 | YEFLWGPRA | 2183 | HLA-A*02:04 |
| 4136 | MAGEA10 | ENSG00000124260 | YPLIPSTPEEV | 2184 | HLA-A*68:02 |
| 4137 | MAGEA10 | ENSG00000124260 | YPLIPSTPEEV | 2184 | HLA-B*51:01 |
| 4138 | MAGEA10 | ENSG00000124260 | YPLIPSTPEEV | 2184 | HLA-B*54:01 |
| 4139 | MAGEA10 | ENSG00000124260 | YPLIPSTPEEV | 2184 | HLA-B*56:01 |
| 4140 | MAGEA10 | ENSG00000124260 | YQMKEPITKA | 2185 | HLA-A*02:03 |
| 4141 | MAGEA10 | ENSG00000124260 | YQMKEPITK | 2186 | HLA-A*03:01 |
| 4142 | MAGEA10 | ENSG00000124260 | YQMKEPITK | 2186 | HLA-A*03:02 |
| 4143 | MAGEA10 | ENSG00000124260 | YQMKEPITK | 2186 | HLA-A*11:01 |
| 4144 | MAGEA10 | ENSG00000124260 | YQMKEPITK | 2186 | HLA-B*13:02 |
| 4145 | MAGEA10 | ENSG00000124260 | YQMKEPITK | 2186 | HLA-B*27:05 |
| 4146 | MAGEA10 | ENSG00000124260 | YQMKEPITK | 2186 | HLA-B*38:01 |
| 4147 | MAGEA10 | ENSG00000124260 | YQMKEPITK | 2186 | HLA-C*02:02 |
| 4148 | MAGEA10 | ENSG00000124260 | YQMKEPITK | 2186 | HLA-C*03:03 |
| 4149 | MAGEA10 | ENSG00000124260 | YQMKEPITK | 2186 | HLA-C*03:04 |
| 4150 | MAGEA10 | ENSG00000124260 | YQMKEPITK | 2186 | HLA-C*07:04 |
| 4151 | MAGEA10 | ENSG00000124260 | YRQVPGSDPAR | 2187 | HLA-B*27:05 |
| 4152 | MAGEA4 | ENSG00000147381 | AAVSSSSPL | 2188 | HLA-B*07:02 |
| 4153 | MAGEA4 | ENSG00000147381 | AAVSSSSPL | 2188 | HLA-B*15:01 |
| 4154 | MAGEA4 | ENSG00000147381 | AAVSSSSPL | 2188 | HLA-B*35:03 |
| 4155 | MAGEA4 | ENSG00000147381 | AAVSSSSPL | 2188 | HLA-B*39:01 |
| 4156 | MAGEA4 | ENSG00000147381 | AAVSSSSPL | 2188 | HLA-B*40:01 |
| 4157 | MAGEA4 | ENSG00000147381 | AAVSSSSPL | 2188 | HLA-B*46:01 |
| 4158 | MAGEA4 | ENSG00000147381 | AAVSSSSPL | 2188 | HLA-B*58:01 |
| 4159 | MAGEA4 | ENSG00000147381 | AAVSSSSPL | 2188 | HLA-C*01:02 |
| 4160 | MAGEA4 | ENSG00000147381 | AAVSSSSPL | 2188 | HLA-C*02:02 |
| 4161 | MAGEA4 | ENSG00000147381 | AAVSSSSPL | 2188 | HLA-C*03:03 |
| 4162 | MAGEA4 | ENSG00000147381 | AAVSSSSPL | 2188 | HLA-C*03:04 |
| 4163 | MAGEA4 | ENSG00000147381 | AAVSSSSPL | 2188 | HLA-C*07:02 |
| 4164 | MAGEA4 | ENSG00000147381 | AAVSSSSPL | 2188 | HLA-C*12:03 |
| 4165 | MAGEA4 | ENSG00000147381 | AAVSSSSPL | 2188 | HLA-C*14:02 |
| 4166 | MAGEA4 | ENSG00000147381 | AAVSSSSPL | 2188 | HLA-C*16:01 |
| 4167 | MAGEA4 | ENSG00000147381 | AAVSSSSPL | 2188 | HLA-C*16:04 |
| 4168 | MAGEA4 | ENSG00000147381 | AEMLERVIKNY | 9 | HLA-A*30:02 |
| 4169 | MAGEA4 | ENSG00000147381 | AEMLERVIKNY | 9 | HLA-B*27:02 |
| 4170 | MAGEA4 | ENSG00000147381 | AEMLERVIKNY | 9 | HLA-B*44:02 |
| 4171 | MAGEA4 | ENSG00000147381 | AEMLERVIKNY | 9 | HLA-B*44:03 |
| 4172 | MAGEA4 | ENSG00000147381 | AEMLERVIKNY | 9 | HLA-B*57:01 |
| 4173 | MAGEA4 | ENSG00000147381 | AEMLERVIKNY | 9 | HLA-C*16:04 |
| 4174 | MAGEA4 | ENSG00000147381 | AEMLERVIKN | 2189 | HLA-B*44:02 |
| 4175 | MAGEA4 | ENSG00000147381 | AEMLERVI | 2190 | HLA-B*37:01 |
| 4176 | MAGEA4 | ENSG00000147381 | AEMLERVI | 2190 | HLA-B*44:02 |
| 4177 | MAGEA4 | ENSG00000147381 | AEMLERVI | 2190 | HLA-B*44:03 |
| 4178 | MAGEA4 | ENSG00000147381 | AEMLERVI | 2190 | HLA-B*49:01 |
| 4179 | MAGEA4 | ENSG00000147381 | AESLFREAL | 2191 | HLA-A*30:01 |
| 4180 | MAGEA4 | ENSG00000147381 | AESLFREAL | 2191 | HLA-B*07:02 |
| 4181 | MAGEA4 | ENSG00000147381 | AESLFREAL | 2191 | HLA-B*18:01 |
| 4182 | MAGEA4 | ENSG00000147381 | AESLFREAL | 2191 | HLA-B*27:02 |
| 4183 | MAGEA4 | ENSG00000147381 | AESLFREAL | 2191 | HLA-B*37:01 |
| 4184 | MAGEA4 | ENSG00000147381 | AESLFREAL | 2191 | HLA-B*40:01 |
| 4185 | MAGEA4 | ENSG00000147381 | AESLFREAL | 2191 | HLA-B*40:02 |
| 4186 | MAGEA4 | ENSG00000147381 | AESLFREAL | 2191 | HLA-B*44:02 |
| 4187 | MAGEA4 | ENSG00000147381 | AESLFREAL | 2191 | HLA-B*44:03 |
| 4188 | MAGEA4 | ENSG00000147381 | AESLFREAL | 2191 | HLA-B*49:01 |
| 4189 | MAGEA4 | ENSG00000147381 | AESLFREAL | 2191 | HLA-C*16:04 |
| 4190 | MAGEA4 | ENSG00000147381 | AESLFREA | 2192 | HLA-B*37:01 |
| 4191 | MAGEA4 | ENSG00000147381 | AETSYVKVL | 10 | HLA-A*30:01 |
| 4192 | MAGEA4 | ENSG00000147381 | AETSYVKVL | 10 | HLA-B*18:01 |
| 4193 | MAGEA4 | ENSG00000147381 | AETSYVKVL | 10 | HLA-B*27:02 |
| 4194 | MAGEA4 | ENSG00000147381 | AETSYVKVL | 10 | HLA-B*27:05 |
| 4195 | MAGEA4 | ENSG00000147381 | AETSYVKVL | 10 | HLA-B*37:01 |
| 4196 | MAGEA4 | ENSG00000147381 | AETSYVKVL | 10 | HLA-B*40:01 |
| 4197 | MAGEA4 | ENSG00000147381 | AETSYVKVL | 10 | HLA-B*40:02 |
| 4198 | MAGEA4 | ENSG00000147381 | AETSYVKVL | 10 | HLA-B*44:02 |
| 4199 | MAGEA4 | ENSG00000147381 | AETSYVKVL | 10 | HLA-B*44:03 |
| 4200 | MAGEA4 | ENSG00000147381 | AETSYVKVL | 10 | HLA-B*49:01 |
| 4201 | MAGEA4 | ENSG00000147381 | AETSYVKVL | 10 | HLA-C*02:02 |
| 4202 | MAGEA4 | ENSG00000147381 | AETSYVKVL | 10 | HLA-C*07:04 |
| 4203 | MAGEA4 | ENSG00000147381 | AETSYVKVL | 10 | HLA-C*12:03 |
| 4204 | MAGEA4 | ENSG00000147381 | AETSYVKVL | 10 | HLA-C*16:01 |
| 4205 | MAGEA4 | ENSG00000147381 | AETSYVKVL | 10 | HLA-C*16:02 |
| 4206 | MAGEA4 | ENSG00000147381 | AETSYVKVL | 10 | HLA-C*16:04 |
| 4207 | MAGEA4 | ENSG00000147381 | AETSYVKV | 2193 | HLA-A*30:01 |
| 4208 | MAGEA4 | ENSG00000147381 | AETSYVKV | 2193 | HLA-B*37:01 |
| 4209 | MAGEA4 | ENSG00000147381 | AETSYVKV | 2193 | HLA-B*49:01 |
| 4210 | MAGEA4 | ENSG00000147381 | AKELVTKAEM | 2194 | HLA-B*15:03 |
| 4211 | MAGEA4 | ENSG00000147381 | AKELVTKAEM | 2194 | HLA-C*04:01 |
| 4212 | MAGEA4 | ENSG00000147381 | ALAETSYVKVL | 2195 | HLA-A*02:03 |
| 4213 | MAGEA4 | ENSG00000147381 | ALAETSYVKVL | 2195 | HLA-A*02:04 |
| 4214 | MAGEA4 | ENSG00000147381 | ALAETSYVKV | 2196 | HLA-A*02:01 |
| 4215 | MAGEA4 | ENSG00000147381 | ALAETSYVKV | 2196 | HLA-A*02:03 |
| 4216 | MAGEA4 | ENSG00000147381 | ALAETSYVKV | 2196 | HLA-A*02:04 |
| 4217 | MAGEA4 | ENSG00000147381 | ALAETSYVKV | 2196 | HLA-A*02:07 |
| 4218 | MAGEA4 | ENSG00000147381 | ALAETSYVKV | 2196 | HLA-B*55:01 |
| 4219 | MAGEA4 | ENSG00000147381 | ALAETSYVK | 162 | HLA-A*01:01 |
| 4220 | MAGEA4 | ENSG00000147381 | ALAETSYVK | 162 | HLA-A*03:01 |
| 4221 | MAGEA4 | ENSG00000147381 | ALAETSYVK | 162 | HLA-A*03:02 |
| 4222 | MAGEA4 | ENSG00000147381 | ALAETSYVK | 162 | HLA-A*11:01 |
| 4223 | MAGEA4 | ENSG00000147381 | ALAETSYVK | 162 | HLA-A*29:02 |
| 4224 | MAGEA4 | ENSG00000147381 | ALAETSYVK | 162 | HLA-A*68:01 |
| 4225 | MAGEA4 | ENSG00000147381 | ALAETSYVK | 162 | HLA-B*13:02 |
| 4226 | MAGEA4 | ENSG00000147381 | ALAETSYVK | 162 | HLA-B*27:02 |
| 4227 | MAGEA4 | ENSG00000147381 | ALAETSYVK | 162 | HLA-B*27:05 |
| 4228 | MAGEA4 | ENSG00000147381 | ALAETSYVK | 162 | HLA-C*07:06 |
| 4229 | MAGEA4 | ENSG00000147381 | ALAETSYV | 2197 | HLA-A*02:01 |
| 4230 | MAGEA4 | ENSG00000147381 | ALAETSYV | 2197 | HLA-A*02:03 |
| 4231 | MAGEA4 | ENSG00000147381 | ALAETSYV | 2197 | HLA-B*55:01 |
| 4232 | MAGEA4 | ENSG00000147381 | ALGLVGAQA | 2198 | HLA-A*02:01 |
| 4233 | MAGEA4 | ENSG00000147381 | ALGLVGAQA | 2198 | HLA-A*02:03 |
| 4234 | MAGEA4 | ENSG00000147381 | ALGLVGAQA | 2198 | HLA-B*56:01 |
| 4235 | MAGEA4 | ENSG00000147381 | ALLEEEEGV | 11 | HLA-A*02:01 |
| 4236 | MAGEA4 | ENSG00000147381 | ALLEEEEGV | 11 | HLA-A*02:03 |
| 4237 | MAGEA4 | ENSG00000147381 | ALLEEEEGV | 11 | HLA-A*02:04 |
| 4238 | MAGEA4 | ENSG00000147381 | ALLEEEEGV | 11 | HLA-A*02:07 |
| 4239 | MAGEA4 | ENSG00000147381 | ALLEEEEGV | 11 | HLA-B*13:02 |
| 4240 | MAGEA4 | ENSG00000147381 | ALLEEEEGV | 11 | HLA-B*55:01 |
| 4241 | MAGEA4 | ENSG00000147381 | ALPTTISFTCW | 2199 | HLA-A*02:07 |
| 4242 | MAGEA4 | ENSG00000147381 | ALPTTISFTCW | 2199 | HLA-A*24:02 |
| 4243 | MAGEA4 | ENSG00000147381 | ALPTTISF | 2200 | HLA-A*23:01 |
| 4244 | MAGEA4 | ENSG00000147381 | ALPTTISF | 2200 | HLA-B*15:01 |
| 4245 | MAGEA4 | ENSG00000147381 | ALPTTISF | 2200 | HLA-B*37:01 |
| 4246 | MAGEA4 | ENSG00000147381 | ALPTTISF | 2200 | HLA-B*46:01 |
| 4247 | MAGEA4 | ENSG00000147381 | ALPTTISF | 2200 | HLA-C*01:02 |
| 4248 | MAGEA4 | ENSG00000147381 | ALPTTISF | 2200 | HLA-C*14:02 |
| 4249 | MAGEA4 | ENSG00000147381 | ALSNKVDEL | 2201 | HLA-A*02:01 |
| 4250 | MAGEA4 | ENSG00000147381 | ALSNKVDEL | 2201 | HLA-A*02:03 |
| 4251 | MAGEA4 | ENSG00000147381 | ALSNKVDEL | 2201 | HLA-A*02:04 |
| 4252 | MAGEA4 | ENSG00000147381 | ALSNKVDEL | 2201 | HLA-A*02:07 |
| 4253 | MAGEA4 | ENSG00000147381 | ALSNKVDEL | 2201 | HLA-B*55:01 |
| 4254 | MAGEA4 | ENSG00000147381 | ALSNKVDEL | 2201 | HLA-C*01:02 |
| 4255 | MAGEA4 | ENSG00000147381 | ALSNKVDEL | 2201 | HLA-C*16:01 |
| 4256 | MAGEA4 | ENSG00000147381 | ALSNKVDEL | 2201 | HLA-C*16:02 |
| 4257 | MAGEA4 | ENSG00000147381 | APTTEEQEAAV | 2202 | HLA-B*56:01 |
| 4258 | MAGEA4 | ENSG00000147381 | APTTEEQEA | 2203 | HLA-B*35:03 |
| 4259 | MAGEA4 | ENSG00000147381 | APTTEEQEA | 2203 | HLA-B*55:01 |
| 4260 | MAGEA4 | ENSG00000147381 | APTTEEQEA | 2203 | HLA-B*56:01 |
| 4261 | MAGEA4 | ENSG00000147381 | AQAPTTEEQEA | 2204 | HLA-B*27:05 |
| 4262 | MAGEA4 | ENSG00000147381 | AQAPTTEEQ | 2205 | HLA-B*13:02 |
| 4263 | MAGEA4 | ENSG00000147381 | AQAPTTEEQ | 2205 | HLA-B*15:01 |
| 4264 | MAGEA4 | ENSG00000147381 | ASALPTTISF | 2206 | HLA-A*01:01 |
| 4265 | MAGEA4 | ENSG00000147381 | ASALPTTISF | 2206 | HLA-B*46:01 |
| 4266 | MAGEA4 | ENSG00000147381 | ASALPTTISF | 2206 | HLA-B*57:01 |
| 4267 | MAGEA4 | ENSG00000147381 | ASALPTTISF | 2206 | HLA-B*58:01 |
| 4268 | MAGEA4 | ENSG00000147381 | ASALPTTISF | 2206 | HLA-C*01:02 |
| 4269 | MAGEA4 | ENSG00000147381 | ASALPTTISF | 2206 | HLA-C*04:01 |
| 4270 | MAGEA4 | ENSG00000147381 | ASALPTTISF | 2206 | HLA-C*16:01 |
| 4271 | MAGEA4 | ENSG00000147381 | ASALPTTISF | 2206 | HLA-C*16:04 |
| 4272 | MAGEA4 | ENSG00000147381 | ASESLKMIF | 2207 | HLA-A*01:01 |
| 4273 | MAGEA4 | ENSG00000147381 | ASESLKMIF | 2207 | HLA-B*57:01 |
| 4274 | MAGEA4 | ENSG00000147381 | ASESLKMIF | 2207 | HLA-B*58:01 |
| 4275 | MAGEA4 | ENSG00000147381 | ASESLKMIF | 2207 | HLA-C*12:03 |
| 4276 | MAGEA4 | ENSG00000147381 | ASNTYTLVT | 2208 | HLA-A*11:01 |
| 4277 | MAGEA4 | ENSG00000147381 | AVSSSSPLV | 2209 | HLA-A*02:01 |
| 4278 | MAGEA4 | ENSG00000147381 | AVSSSSPLV | 2209 | HLA-A*02:03 |
| 4279 | MAGEA4 | ENSG00000147381 | AVSSSSPLV | 2209 | HLA-A*02:07 |
| 4280 | MAGEA4 | ENSG00000147381 | AVSSSSPLV | 2209 | HLA-A*03:02 |
| 4281 | MAGEA4 | ENSG00000147381 | AVSSSSPLV | 2209 | HLA-A*26:01 |
| 4282 | MAGEA4 | ENSG00000147381 | AVSSSSPLV | 2209 | HLA-A*32:01 |
| 4283 | MAGEA4 | ENSG00000147381 | AVSSSSPLV | 2209 | HLA-B*13:02 |
| 4284 | MAGEA4 | ENSG00000147381 | AVSSSSPLV | 2209 | HLA-B*27:05 |
| 4285 | MAGEA4 | ENSG00000147381 | AVSSSSPLV | 2209 | HLA-B*39:01 |
| 4286 | MAGEA4 | ENSG00000147381 | AVSSSSPLV | 2209 | HLA-B*55:01 |
| 4287 | MAGEA4 | ENSG00000147381 | AVSSSSPLV | 2209 | HLA-C*02:02 |
| 4288 | MAGEA4 | ENSG00000147381 | AVSSSSPLV | 2209 | HLA-C*06:02 |
| 4289 | MAGEA4 | ENSG00000147381 | AVSSSSPLV | 2209 | HLA-C*16:02 |
| 4290 | MAGEA4 | ENSG00000147381 | AVSSSSPL | 2210 | HLA-C*05:01 |
| 4291 | MAGEA4 | ENSG00000147381 | AYPSLREAALL | 2211 | HLA-A*24:02 |
| 4292 | MAGEA4 | ENSG00000147381 | AYPSLREAAL | 2212 | HLA-A*24:02 |
| 4293 | MAGEA4 | ENSG00000147381 | AYPSLREAAL | 2212 | HLA-C*01:02 |
| 4294 | MAGEA4 | ENSG00000147381 | AYPSLREAAL | 2212 | HLA-C*14:02 |
| 4295 | MAGEA4 | ENSG00000147381 | DAESLFREA | 2213 | HLA-B*51:01 |
| 4296 | MAGEA4 | ENSG00000147381 | DAESLFREA | 2213 | HLA-B*54:01 |
| 4297 | MAGEA4 | ENSG00000147381 | DELAHFLLRKY | 2214 | HLA-B*44:02 |
| 4298 | MAGEA4 | ENSG00000147381 | DELAHFLLR | 2215 | HLA-A*33:01 |
| 4299 | MAGEA4 | ENSG00000147381 | DELAHFLL | 2216 | HLA-B*18:01 |
| 4300 | MAGEA4 | ENSG00000147381 | DELAHFLL | 2216 | HLA-B*37:01 |
| 4301 | MAGEA4 | ENSG00000147381 | DELAHFLL | 2216 | HLA-B*40:02 |
| 4302 | MAGEA4 | ENSG00000147381 | DELAHFLL | 2216 | HLA-B*44:02 |
| 4303 | MAGEA4 | ENSG00000147381 | DGLLGNNQI | 2217 | HLA-B*51:01 |
| 4304 | MAGEA4 | ENSG00000147381 | DGREHTVY | 2218 | HLA-B*08:01 |
| 4305 | MAGEA4 | ENSG00000147381 | DGREHTVY | 2218 | HLA-B*18:01 |
| 4306 | MAGEA4 | ENSG00000147381 | DPASNTYTLV | 2219 | HLA-A*68:01 |
| 4307 | MAGEA4 | ENSG00000147381 | DPASNTYTLV | 2219 | HLA-B*51:01 |
| 4308 | MAGEA4 | ENSG00000147381 | DPASNTYTL | 2220 | HLA-A*23:01 |
| 4309 | MAGEA4 | ENSG00000147381 | DPASNTYTL | 2220 | HLA-A*68:01 |
| 4310 | MAGEA4 | ENSG00000147381 | DPASNTYTL | 2220 | HLA-B*07:02 |
| 4311 | MAGEA4 | ENSG00000147381 | DPASNTYTL | 2220 | HLA-B*35:01 |
| 4312 | MAGEA4 | ENSG00000147381 | DPASNTYTL | 2220 | HLA-B*35:03 |
| 4313 | MAGEA4 | ENSG00000147381 | DPASNTYTL | 2220 | HLA-B*38:01 |
| 4314 | MAGEA4 | ENSG00000147381 | DPASNTYTL | 2220 | HLA-B*39:01 |
| 4315 | MAGEA4 | ENSG00000147381 | DPASNTYTL | 2220 | HLA-B*51:01 |
| 4316 | MAGEA4 | ENSG00000147381 | DPASNTYTL | 2220 | HLA-B*55:01 |
| 4317 | MAGEA4 | ENSG00000147381 | DPASNTYTL | 2220 | HLA-B*56:01 |
| 4318 | MAGEA4 | ENSG00000147381 | DPASNTYTL | 2220 | HLA-C*07:02 |
| 4319 | MAGEA4 | ENSG00000147381 | DVKEVDPASN | 2221 | HLA-A*25:01 |
| 4320 | MAGEA4 | ENSG00000147381 | DVKEVDPASN | 2221 | HLA-A*26:01 |
| 4321 | MAGEA4 | ENSG00000147381 | DVKEVDPASN | 2221 | HLA-A*33:01 |
| 4322 | MAGEA4 | ENSG00000147381 | DVKEVDPASN | 2221 | HLA-A*68:01 |
| 4323 | MAGEA4 | ENSG00000147381 | EALGLVGAQA | 2222 | HLA-A*33:03 |
| 4324 | MAGEA4 | ENSG00000147381 | EALGLVGAQA | 2222 | HLA-B*54:01 |
| 4325 | MAGEA4 | ENSG00000147381 | EALGLVGAQA | 2222 | HLA-C*07:06 |
| 4326 | MAGEA4 | ENSG00000147381 | EALGLVGAQ | 2223 | HLA-A*26:01 |
| 4327 | MAGEA4 | ENSG00000147381 | EALGLVGAQ | 2223 | HLA-A*33:01 |
| 4328 | MAGEA4 | ENSG00000147381 | EALGLVGAQ | 2223 | HLA-A*33:03 |
| 4329 | MAGEA4 | ENSG00000147381 | EALGLVGAQ | 2223 | HLA-C*04:01 |
| 4330 | MAGEA4 | ENSG00000147381 | EALGLVGAQ | 2223 | HLA-C*07:01 |
| 4331 | MAGEA4 | ENSG00000147381 | EALGLVGAQ | 2223 | HLA-C*12:03 |
| 4332 | MAGEA4 | ENSG00000147381 | EALGLVGA | 2224 | HLA-B*54:01 |
| 4333 | MAGEA4 | ENSG00000147381 | EAQEEALGL | 2225 | HLA-B*35:03 |
| 4334 | MAGEA4 | ENSG00000147381 | EAQEEALGL | 2225 | HLA-C*07:06 |
| 4335 | MAGEA4 | ENSG00000147381 | EEALGLVGAQA | 2226 | HLA-B*44:03 |
| 4336 | MAGEA4 | ENSG00000147381 | EEALGLVGA | 2227 | HLA-A*30:01 |
| 4337 | MAGEA4 | ENSG00000147381 | EEALGLVGA | 2227 | HLA-B*18:01 |
| 4338 | MAGEA4 | ENSG00000147381 | EEALGLVGA | 2227 | HLA-B*40:02 |
| 4339 | MAGEA4 | ENSG00000147381 | EEALGLVGA | 2227 | HLA-B*49:01 |
| 4340 | MAGEA4 | ENSG00000147381 | EEEGPSTSPDA | 2228 | HLA-B*39:01 |
| 4341 | MAGEA4 | ENSG00000147381 | EEEGPSTSP | 2229 | HLA-B*39:01 |
| 4342 | MAGEA4 | ENSG00000147381 | EEIWEELGV | 2230 | HLA-B*49:01 |
| 4343 | MAGEA4 | ENSG00000147381 | EELGVMGVY | 98 | HLA-A*25:01 |
| 4344 | MAGEA4 | ENSG00000147381 | EELGVMGVY | 98 | HLA-A*26:01 |
| 4345 | MAGEA4 | ENSG00000147381 | EELGVMGVY | 98 | HLA-A*30:02 |
| 4346 | MAGEA4 | ENSG00000147381 | EELGVMGVY | 98 | HLA-B*15:03 |
| 4347 | MAGEA4 | ENSG00000147381 | EELGVMGVY | 98 | HLA-B*18:01 |
| 4348 | MAGEA4 | ENSG00000147381 | EELGVMGVY | 98 | HLA-B*27:02 |
| 4349 | MAGEA4 | ENSG00000147381 | EELGVMGVY | 98 | HLA-B*40:01 |
| 4350 | MAGEA4 | ENSG00000147381 | EELGVMGVY | 98 | HLA-B*44:02 |
| 4351 | MAGEA4 | ENSG00000147381 | EELGVMGVY | 98 | HLA-B*44:03 |
| 4352 | MAGEA4 | ENSG00000147381 | EELGVMGVY | 98 | HLA-C*16:04 |
| 4353 | MAGEA4 | ENSG00000147381 | EELGVMGV | 2231 | HLA-B*18:01 |
| 4354 | MAGEA4 | ENSG00000147381 | EELGVMGV | 2231 | HLA-B*37:01 |
| 4355 | MAGEA4 | ENSG00000147381 | EELGVMGV | 2231 | HLA-B*40:02 |
| 4356 | MAGEA4 | ENSG00000147381 | EELGVMGV | 2231 | HLA-B*49:01 |
| 4357 | MAGEA4 | ENSG00000147381 | EEVPAAESA | 2232 | HLA-A*30:01 |
| 4358 | MAGEA4 | ENSG00000147381 | EEVPAAESA | 2232 | HLA-B*18:01 |
| 4359 | MAGEA4 | ENSG00000147381 | EEVPAAESA | 2232 | HLA-B*40:01 |
| 4360 | MAGEA4 | ENSG00000147381 | EEVPAAESA | 2232 | HLA-B*40:02 |
| 4361 | MAGEA4 | ENSG00000147381 | EEVPAAESA | 2232 | HLA-B*49:01 |
| 4362 | MAGEA4 | ENSG00000147381 | EHTVYGEPR | 2233 | HLA-A*33:01 |
| 4363 | MAGEA4 | ENSG00000147381 | EHTVYGEPR | 2233 | HLA-A*33:03 |
| 4364 | MAGEA4 | ENSG00000147381 | EHVVRVNAR | 2234 | HLA-A*33:03 |
| 4365 | MAGEA4 | ENSG00000147381 | EIWEELGVMGV | 2235 | HLA-A*68:02 |
| 4366 | MAGEA4 | ENSG00000147381 | ELGVMGVY | 2236 | HLA-A*25:01 |
| 4367 | MAGEA4 | ENSG00000147381 | ELGVMGVY | 2236 | HLA-A*26:01 |
| 4368 | MAGEA4 | ENSG00000147381 | ELGVMGVY | 2236 | HLA-B*15:01 |
| 4369 | MAGEA4 | ENSG00000147381 | ELGVMGVY | 2236 | HLA-C*07:01 |
| 4370 | MAGEA4 | ENSG00000147381 | ELGVMGVY | 2236 | HLA-C*07:04 |
| 4371 | MAGEA4 | ENSG00000147381 | ELVTKAEMLER | 2237 | HLA-A*33:01 |
| 4372 | MAGEA4 | ENSG00000147381 | ELVTKAEML | 2238 | HLA-A*25:01 |
| 4373 | MAGEA4 | ENSG00000147381 | ELVTKAEML | 2238 | HLA-A*26:01 |
| 4374 | MAGEA4 | ENSG00000147381 | ELVTKAEML | 2238 | HLA-B*08:01 |
| 4375 | MAGEA4 | ENSG00000147381 | ELVTKAEM | 2239 | HLA-B*08:01 |
| 4376 | MAGEA4 | ENSG00000147381 | EMLERVIKNY | 2240 | HLA-A*25:01 |
| 4377 | MAGEA4 | ENSG00000147381 | EMLERVIKNY | 2240 | HLA-B*44:02 |
| 4378 | MAGEA4 | ENSG00000147381 | ESAGPPQSP | 2241 | HLA-B*39:01 |
| 4379 | MAGEA4 | ENSG00000147381 | ESLFREALSNK | 2242 | HLA-A*33:01 |
| 4380 | MAGEA4 | ENSG00000147381 | ESLFREAL | 2243 | HLA-B*08:01 |
| 4381 | MAGEA4 | ENSG00000147381 | ETSYVKVLEHV | 2244 | HLA-A*68:02 |
| 4382 | MAGEA4 | ENSG00000147381 | ETSYVKVLEH | 2245 | HLA-A*68:01 |
| 4383 | MAGEA4 | ENSG00000147381 | ETSYVKVLE | 2246 | HLA-A*68:02 |
| 4384 | MAGEA4 | ENSG00000147381 | EVDPASNTYTL | 2247 | HLA-A*01:01 |
| 4385 | MAGEA4 | ENSG00000147381 | EVDPASNTYTL | 2247 | HLA-A*02:07 |
| 4386 | MAGEA4 | ENSG00000147381 | EVDPASNTYTL | 2247 | HLA-A*25:01 |
| 4387 | MAGEA4 | ENSG00000147381 | EVDPASNTYTL | 2247 | HLA-A*26:01 |
| 4388 | MAGEA4 | ENSG00000147381 | EVDPASNTYTL | 2247 | HLA-A*33:03 |
| 4389 | MAGEA4 | ENSG00000147381 | EVDPASNTYTL | 2247 | HLA-A*68:01 |
| 4390 | MAGEA4 | ENSG00000147381 | EVDPASNTYTL | 2247 | HLA-A*68:02 |
| 4391 | MAGEA4 | ENSG00000147381 | EVDPASNTYTL | 2247 | HLA-B*27:05 |
| 4392 | MAGEA4 | ENSG00000147381 | EVDPASNTYTL | 2247 | HLA-B*35:03 |
| 4393 | MAGEA4 | ENSG00000147381 | EVDPASNTYTL | 2247 | HLA-B*38:01 |
| 4394 | MAGEA4 | ENSG00000147381 | EVDPASNTYTL | 2247 | HLA-B*39:01 |
| 4395 | MAGEA4 | ENSG00000147381 | EVDPASNTYTL | 2247 | HLA-B*40:01 |
| 4396 | MAGEA4 | ENSG00000147381 | EVDPASNTYTL | 2247 | HLA-C*05:01 |
| 4397 | MAGEA4 | ENSG00000147381 | EVDPASNTYTL | 2247 | HLA-C*07:06 |
| 4398 | MAGEA4 | ENSG00000147381 | EVDPASNTY | 12 | HLA-A*01:01 |
| 4399 | MAGEA4 | ENSG00000147381 | EVDPASNTY | 12 | HLA-A*25:01 |
| 4400 | MAGEA4 | ENSG00000147381 | EVDPASNTY | 12 | HLA-A*26:01 |
| 4401 | MAGEA4 | ENSG00000147381 | EVDPASNTY | 12 | HLA-A*29:02 |
| 4402 | MAGEA4 | ENSG00000147381 | EVDPASNTY | 12 | HLA-A*30:02 |
| 4403 | MAGEA4 | ENSG00000147381 | EVDPASNTY | 12 | HLA-A*32:01 |
| 4404 | MAGEA4 | ENSG00000147381 | EVDPASNTY | 12 | HLA-A*33:03 |
| 4405 | MAGEA4 | ENSG00000147381 | EVDPASNTY | 12 | HLA-A*68:01 |
| 4406 | MAGEA4 | ENSG00000147381 | EVDPASNTY | 12 | HLA-B*15:01 |
| 4407 | MAGEA4 | ENSG00000147381 | EVDPASNTY | 12 | HLA-B*15:03 |
| 4408 | MAGEA4 | ENSG00000147381 | EVDPASNTY | 12 | HLA-B*18:01 |
| 4409 | MAGEA4 | ENSG00000147381 | EVDPASNTY | 12 | HLA-B*35:01 |
| 4410 | MAGEA4 | ENSG00000147381 | EVDPASNTY | 12 | HLA-B*38:01 |
| 4411 | MAGEA4 | ENSG00000147381 | EVDPASNTY | 12 | HLA-B*39:01 |
| 4412 | MAGEA4 | ENSG00000147381 | EVDPASNTY | 12 | HLA-B*44:03 |
| 4413 | MAGEA4 | ENSG00000147381 | EVDPASNTY | 12 | HLA-B*46:01 |
| 4414 | MAGEA4 | ENSG00000147381 | EVDPASNTY | 12 | HLA-B*55:01 |
| 4415 | MAGEA4 | ENSG00000147381 | EVDPASNTY | 12 | HLA-B*58:01 |
| 4416 | MAGEA4 | ENSG00000147381 | EVDPASNTY | 12 | HLA-C*02:02 |
| 4417 | MAGEA4 | ENSG00000147381 | EVDPASNTY | 12 | HLA-C*03:03 |
| 4418 | MAGEA4 | ENSG00000147381 | EVDPASNTY | 12 | HLA-C*05:01 |
| 4419 | MAGEA4 | ENSG00000147381 | EVDPASNTY | 12 | HLA-C*07:04 |
| 4420 | MAGEA4 | ENSG00000147381 | EVDPASNTY | 12 | HLA-C*07:06 |
| 4421 | MAGEA4 | ENSG00000147381 | EVDPASNTY | 12 | HLA-C*12:03 |
| 4422 | MAGEA4 | ENSG00000147381 | EVDPASNTY | 12 | HLA-C*16:02 |
| 4423 | MAGEA4 | ENSG00000147381 | EVDPASNTY | 12 | HLA-C*16:04 |
| 4424 | MAGEA4 | ENSG00000147381 | EVPAAESAGP | 2248 | HLA-A*26:01 |
| 4425 | MAGEA4 | ENSG00000147381 | EYRQVPGSNP | 2249 | HLA-A*33:03 |
| 4426 | MAGEA4 | ENSG00000147381 | FGIDVKEV | 2018 | HLA-B*46:01 |
| 4427 | MAGEA4 | ENSG00000147381 | FGIDVKEV | 2018 | HLA-B*49:01 |
| 4428 | MAGEA4 | ENSG00000147381 | FGIDVKEV | 2018 | HLA-B*51:01 |
| 4429 | MAGEA4 | ENSG00000147381 | FGIDVKEV | 2018 | HLA-C*02:02 |
| 4430 | MAGEA4 | ENSG00000147381 | FGIDVKEV | 2018 | HLA-C*03:04 |
| 4431 | MAGEA4 | ENSG00000147381 | FGIDVKEV | 2018 | HLA-C*12:03 |
| 4432 | MAGEA4 | ENSG00000147381 | FGIDVKEV | 2018 | HLA-C*16:02 |
| 4433 | MAGEA4 | ENSG00000147381 | FGKASESLK | 2250 | HLA-C*07:02 |
| 4434 | MAGEA4 | ENSG00000147381 | FGKASESL | 2251 | HLA-B*46:01 |
| 4435 | MAGEA4 | ENSG00000147381 | FGKASESL | 2251 | HLA-C*03:04 |
| 4436 | MAGEA4 | ENSG00000147381 | FGKASESL | 2251 | HLA-C*14:02 |
| 4437 | MAGEA4 | ENSG00000147381 | FLWGPRALAET | 199 | HLA-A*02:01 |
| 4438 | MAGEA4 | ENSG00000147381 | FLWGPRALAET | 199 | HLA-A*02:03 |
| 4439 | MAGEA4 | ENSG00000147381 | FLWGPRALAET | 199 | HLA-A*02:04 |
| 4440 | MAGEA4 | ENSG00000147381 | FLWGPRALAET | 199 | HLA-A*02:07 |
| 4441 | MAGEA4 | ENSG00000147381 | FLWGPRALA | 2252 | HLA-A*02:01 |
| 4442 | MAGEA4 | ENSG00000147381 | FLWGPRAL | 2253 | HLA-A*02:04 |
| 4443 | MAGEA4 | ENSG00000147381 | FPKTGLLII | 2254 | HLA-B*51:01 |
| 4444 | MAGEA4 | ENSG00000147381 | FPKTGLLII | 2254 | HLA-B*54:01 |
| 4445 | MAGEA4 | ENSG00000147381 | FPKTGLLI | 2255 | HLA-B*51:01 |
| 4446 | MAGEA4 | ENSG00000147381 | FPVIFGKAS | 2256 | HLA-B*54:01 |
| 4447 | MAGEA4 | ENSG00000147381 | FPVIFGKA | 2257 | HLA-B*54:01 |
| 4448 | MAGEA4 | ENSG00000147381 | FPVIFGKA | 2257 | HLA-B*55:01 |
| 4449 | MAGEA4 | ENSG00000147381 | FPVIFGKA | 2257 | HLA-B*56:01 |
| 4450 | MAGEA4 | ENSG00000147381 | FREALSNKV | 2258 | HLA-C*06:02 |
| 4451 | MAGEA4 | ENSG00000147381 | GASALPTTI | 2259 | HLA-B*13:02 |
| 4452 | MAGEA4 | ENSG00000147381 | GASALPTTI | 2259 | HLA-B*15:03 |
| 4453 | MAGEA4 | ENSG00000147381 | GASALPTTI | 2259 | HLA-B*49:01 |
| 4454 | MAGEA4 | ENSG00000147381 | GASALPTTI | 2259 | HLA-B*51:01 |
| 4455 | MAGEA4 | ENSG00000147381 | GASALPTTI | 2259 | HLA-B*58:01 |
| 4456 | MAGEA4 | ENSG00000147381 | GASALPTTI | 2259 | HLA-C*02:02 |
| 4457 | MAGEA4 | ENSG00000147381 | GASALPTTI | 2259 | HLA-C*I2:03 |
| 4458 | MAGEA4 | ENSG00000147381 | GASALPTTI | 2259 | HLA-C*16:02 |
| 4459 | MAGEA4 | ENSG00000147381 | GASALPTTI | 2259 | HLA-C*16:04 |
| 4460 | MAGEA4 | ENSG00000147381 | GKASESLKM | 2260 | HLA-B*15:03 |
| 4461 | MAGEA4 | ENSG00000147381 | GLLGNNQIFPK | 2261 | HLA-A*03:01 |
| 4462 | MAGEA4 | ENSG00000147381 | GLLGNNQIFPK | 2261 | HLA-A*03:02 |
| 4463 | MAGEA4 | ENSG00000147381 | GLLGNNQIFPK | 2261 | HLA-A*11:01 |
| 4464 | MAGEA4 | ENSG00000147381 | GLLGNNQIFPK | 2261 | HLA-A*31:01 |
| 4465 | MAGEA4 | ENSG00000147381 | GLLGNNQIF | 2262 | HLA-B*15:01 |
| 4466 | MAGEA4 | ENSG00000147381 | GLLIIVLGTI | 2263 | HLA-A*02:04 |
| 4467 | MAGEA4 | ENSG00000147381 | GPPQSPQGASA | 2264 | HLA-B*56:01 |
| 4468 | MAGEA4 | ENSG00000147381 | GPRALAETSYV | 2265 | HLA-C*07:02 |
| 4469 | MAGEA4 | ENSG00000147381 | GPRALAETSY | 2266 | HLA-A*30:02 |
| 4470 | MAGEA4 | ENSG00000147381 | GPRALAETSY | 2266 | HLA-B*07:02 |
| 4471 | MAGEA4 | ENSG00000147381 | GPRALAETSY | 2266 | HLA-B*15:01 |
| 4472 | MAGEA4 | ENSG00000147381 | GPRALAETSY | 2266 | HLA-B*15:03 |
| 4473 | MAGEA4 | ENSG00000147381 | GPRALAETSY | 2266 | HLA-B*35:01 |
| 4474 | MAGEA4 | ENSG00000147381 | GPRALAETSY | 2266 | HLA-B*55:01 |
| 4475 | MAGEA4 | ENSG00000147381 | GSNPARYEFLW | 2267 | HLA-B*57:01 |
| 4476 | MAGEA4 | ENSG00000147381 | GSNPARYEF | 2268 | HLA-A*23:01 |
| 4477 | MAGEA4 | ENSG00000147381 | GSNPARYEF | 2268 | HLA-A*29:02 |
| 4478 | MAGEA4 | ENSG00000147381 | GSNPARYEF | 2268 | HLA-A*30:02 |
| 4479 | MAGEA4 | ENSG00000147381 | GSNPARYEF | 2268 | HLA-A*31:01 |
| 4480 | MAGEA4 | ENSG00000147381 | GSNPARYEF | 2268 | HLA-A*32:01 |
| 4481 | MAGEA4 | ENSG00000147381 | GSNPARYEF | 2268 | HLA-B*15:01 |
| 4482 | MAGEA4 | ENSG00000147381 | GSNPARYEF | 2268 | HLA-B*15:03 |
| 4483 | MAGEA4 | ENSG00000147381 | GSNPARYEF | 2268 | HLA-B*46:01 |
| 4484 | MAGEA4 | ENSG00000147381 | GSNPARYEF | 2268 | HLA-B*57:01 |
| 4485 | MAGEA4 | ENSG00000147381 | GSNPARYEF | 2268 | HLA-B*58:01 |
| 4486 | MAGEA4 | ENSG00000147381 | GSNPARYEF | 2268 | HLA-C*02:02 |
| 4487 | MAGEA4 | ENSG00000147381 | GSNPARYEF | 2268 | HLA-C*16:01 |
| 4488 | MAGEA4 | ENSG00000147381 | GSNPARYEF | 2268 | HLA-C*16:04 |
| 4489 | MAGEA4 | ENSG00000147381 | GTLEEVPAA | 2269 | HLA-A*02:01 |
| 4490 | MAGEA4 | ENSG00000147381 | GVMGVYDGR | 2270 | HLA-A*03:02 |
| 4491 | MAGEA4 | ENSG00000147381 | GVMGVYDGR | 2270 | HLA-A*11:01 |
| 4492 | MAGEA4 | ENSG00000147381 | GVMGVYDGR | 2270 | HLA-A*31:01 |
| 4493 | MAGEA4 | ENSG00000147381 | GVMGVYDGR | 2270 | HLA-A*33:03 |
| 4494 | MAGEA4 | ENSG00000147381 | GVMGVYDGR | 2270 | HLA-A*68:01 |
| 4495 | MAGEA4 | ENSG00000147381 | GVMGVYDGR | 2270 | HLA-C*07:06 |
| 4496 | MAGEA4 | ENSG00000147381 | GVYDGREHTVY | 2271 | HLA-A*01:01 |
| 4497 | MAGEA4 | ENSG00000147381 | GVYDGREHTVY | 2271 | HLA-A*03:01 |
| 4498 | MAGEA4 | ENSG00000147381 | GVYDGREHTVY | 2271 | HLA-A*03:02 |
| 4499 | MAGEA4 | ENSG00000147381 | GVYDGREHTVY | 2271 | HLA-A*11:01 |
| 4500 | MAGEA4 | ENSG00000147381 | GVYDGREHTVY | 2271 | HLA-A*25:01 |
| 4501 | MAGEA4 | ENSG00000147381 | GVYDGREHTVY | 2271 | HLA-A*26:01 |
| 4502 | MAGEA4 | ENSG00000147381 | GVYDGREHTVY | 2271 | HLA-A*29:02 |
| 4503 | MAGEA4 | ENSG00000147381 | GVYDGREHTVY | 2271 | HLA-A*30:02 |
| 4504 | MAGEA4 | ENSG00000147381 | GVYDGREHTVY | 2271 | HLA-A*32:01 |
| 4505 | MAGEA4 | ENSG00000147381 | GVYDGREHTVY | 2271 | HLA-B*15:01 |
| 4506 | MAGEA4 | ENSG00000147381 | GVYDGREHTVY | 2271 | HLA-B*15:03 |
| 4507 | MAGEA4 | ENSG00000147381 | GVYDGREHTVY | 2271 | HLA-B*27:05 |
| 4508 | MAGEA4 | ENSG00000147381 | GVYDGREHTVY | 2271 | HLA-B*35:01 |
| 4509 | MAGEA4 | ENSG00000147381 | GVYDGREHTVY | 2271 | HLA-B*46:01 |
| 4510 | MAGEA4 | ENSG00000147381 | GVYDGREHTVY | 2271 | HLA-B*55:01 |
| 4511 | MAGEA4 | ENSG00000147381 | GVYDGREHTVY | 2271 | HLA-B*58:01 |
| 4512 | MAGEA4 | ENSG00000147381 | GVYDGREHTVY | 2271 | HLA-C*02:02 |
| 4513 | MAGEA4 | ENSG00000147381 | GVYDGREHTVY | 2271 | HLA-C*07:04 |
| 4514 | MAGEA4 | ENSG00000147381 | GVYDGREHTVY | 2271 | HLA-C*12:03 |
| 4515 | MAGEA4 | ENSG00000147381 | GVYDGREHTVY | 2271 | HLA-C*16:01 |
| 4516 | MAGEA4 | ENSG00000147381 | GVYDGREHTVY | 2271 | HLA-C*16:04 |
| 4517 | MAGEA4 | ENSG00000147381 | GVYDGREHTV | 2272 | HLA-A*02:01 |
| 4518 | MAGEA4 | ENSG00000147381 | GVYDGREHTV | 2272 | HLA-A*02:03 |
| 4519 | MAGEA4 | ENSG00000147381 | GVYDGREHTV | 2272 | HLA-A*02:04 |
| 4520 | MAGEA4 | ENSG00000147381 | GVYDGREHTV | 2272 | HLA-A*02:07 |
| 4521 | MAGEA4 | ENSG00000147381 | GVYDGREHTV | 2272 | HLA-A*03:01 |
| 4522 | MAGEA4 | ENSG00000147381 | GVYDGREHTV | 2272 | HLA-A*25:01 |
| 4523 | MAGEA4 | ENSG00000147381 | GVYDGREHTV | 2272 | HLA-A*26:01 |
| 4524 | MAGEA4 | ENSG00000147381 | GVYDGREHTV | 2272 | HLA-A*30:01 |
| 4525 | MAGEA4 | ENSG00000147381 | GVYDGREHTV | 2272 | HLA-A*32:01 |
| 4526 | MAGEA4 | ENSG00000147381 | GVYDGREHTV | 2272 | HLA-A*68:02 |
| 4527 | MAGEA4 | ENSG00000147381 | GVYDGREHTV | 2272 | HLA-B*13:02 |
| 4528 | MAGEA4 | ENSG00000147381 | GVYDGREHTV | 2272 | HLA-B*15:01 |
| 4529 | MAGEA4 | ENSG00000147381 | GVYDGREHTV | 2272 | HLA-B*27:05 |
| 4530 | MAGEA4 | ENSG00000147381 | GVYDGREHTV | 2272 | HLA-B*37:01 |
| 4531 | MAGEA4 | ENSG00000147381 | GVYDGREHTV | 2272 | HLA-B*40:02 |
| 4532 | MAGEA4 | ENSG00000147381 | GVYDGREHTV | 2272 | HLA-B*46:01 |
| 4533 | MAGEA4 | ENSG00000147381 | GVYDGREHTV | 2272 | HLA-B*49:01 |
| 4534 | MAGEA4 | ENSG00000147381 | GVYDGREHTV | 2272 | HLA-B*51:01 |
| 4535 | MAGEA4 | ENSG00000147381 | GVYDGREHTV | 2272 | HLA-B*55:01 |
| 4536 | MAGEA4 | ENSG00000147381 | GVYDGREHTV | 2272 | HLA-B*56:01 |
| 4537 | MAGEA4 | ENSG00000147381 | GVYDGREHTV | 2272 | HLA-B*58:01 |
| 4538 | MAGEA4 | ENSG00000147381 | GVYDGREHTV | 2272 | HLA-C*01:02 |
| 4539 | MAGEA4 | ENSG00000147381 | GVYDGREHTV | 2272 | HLA-C*02:02 |
| 4540 | MAGEA4 | ENSG00000147381 | GVYDGREHTV | 2272 | HLA-C*03:03 |
| 4541 | MAGEA4 | ENSG00000147381 | GVYDGREHTV | 2272 | HLA-C*03:04 |
| 4542 | MAGEA4 | ENSG00000147381 | GVYDGREHTV | 2272 | HLA-C*06:02 |
| 4543 | MAGEA4 | ENSG00000147381 | GVYDGREHTV | 2272 | HLA-C*07:02 |
| 4544 | MAGEA4 | ENSG00000147381 | GVYDGREHTV | 2272 | HLA-C*12:03 |
| 4545 | MAGEA4 | ENSG00000147381 | GVYDGREHTV | 2272 | HLA-C*16:02 |
| 4546 | MAGEA4 | ENSG00000147381 | GVYDGREHTV | 2272 | HLA-C*16:04 |
| 4547 | MAGEA4 | ENSG00000147381 | HTVYGEPR | 2273 | HLA-A*68:01 |
| 4548 | MAGEA4 | ENSG00000147381 | HVVRVNARV | 2274 | HLA-A*68:02 |
| 4549 | MAGEA4 | ENSG00000147381 | IAMEGDSA | 2275 | HLA-B*54:01 |
| 4550 | MAGEA4 | ENSG00000147381 | IAMEGDSA | 2275 | HLA-C*01:02 |
| 4551 | MAGEA4 | ENSG00000147381 | IAMEGDSA | 2275 | HLA-C*03:03 |
| 4552 | MAGEA4 | ENSG00000147381 | IAMEGDSA | 2275 | HLA-C*03:04 |
| 4553 | MAGEA4 | ENSG00000147381 | IAMEGDSA | 2275 | HLA-C*05:01 |
| 4554 | MAGEA4 | ENSG00000147381 | IAMEGDSA | 2275 | HLA-C*14:02 |
| 4555 | MAGEA4 | ENSG00000147381 | IAYPSLREAAL | 2276 | HLA-B*07:02 |
| 4556 | MAGEA4 | ENSG00000147381 | IAYPSLREAAL | 2276 | HLA-B*35:03 |
| 4557 | MAGEA4 | ENSG00000147381 | IAYPSLREAAL | 2276 | HLA-B*46:01 |
| 4558 | MAGEA4 | ENSG00000147381 | IAYPSLREAAL | 2276 | HLA-C*01:02 |
| 4559 | MAGEA4 | ENSG00000147381 | IAYPSLREAAL | 2276 | HLA-C*02:02 |
| 4560 | MAGEA4 | ENSG00000147381 | IAYPSLREAAL | 2276 | HLA-C*03:03 |
| 4561 | MAGEA4 | ENSG00000147381 | IAYPSLREAAL | 2276 | HLA-C*03:04 |
| 4562 | MAGEA4 | ENSG00000147381 | IAYPSLREAAL | 2276 | HLA-C*16:01 |
| 4563 | MAGEA4 | ENSG00000147381 | IAYPSLREAAL | 2276 | HLA-C*16:02 |
| 4564 | MAGEA4 | ENSG00000147381 | IAYPSLREAA | 2277 | HLA-B*54:01 |
| 4565 | MAGEA4 | ENSG00000147381 | IAYPSLREAA | 2277 | HLA-B*56:01 |
| 4566 | MAGEA4 | ENSG00000147381 | IAYPSLREA | 2278 | HLA-A*02:01 |
| 4567 | MAGEA4 | ENSG00000147381 | IAYPSLREA | 2278 | HLA-A*02:03 |
| 4568 | MAGEA4 | ENSG00000147381 | IAYPSLREA | 2278 | HLA-B*08:01 |
| 4569 | MAGEA4 | ENSG00000147381 | IAYPSLREA | 2278 | HLA-B*46:01 |
| 4570 | MAGEA4 | ENSG00000147381 | IAYPSLREA | 2278 | HLA-B*51:01 |
| 4571 | MAGEA4 | ENSG00000147381 | IAYPSLREA | 2278 | HLA-B*54:01 |
| 4572 | MAGEA4 | ENSG00000147381 | IAYPSLREA | 2278 | HLA-B*55:01 |
| 4573 | MAGEA4 | ENSG00000147381 | IAYPSLREA | 2278 | HLA-B*56:01 |
| 4574 | MAGEA4 | ENSG00000147381 | IAYPSLREA | 2278 | HLA-B*57:01 |
| 4575 | MAGEA4 | ENSG00000147381 | IAYPSLREA | 2278 | HLA-B*58:01 |
| 4576 | MAGEA4 | ENSG00000147381 | IAYPSLREA | 2278 | HLA-C*02:02 |
| 4577 | MAGEA4 | ENSG00000147381 | IAYPSLREA | 2278 | HLA-C*03:03 |
| 4578 | MAGEA4 | ENSG00000147381 | IAYPSLREA | 2278 | HLA-C*03:04 |
| 4579 | MAGEA4 | ENSG00000147381 | IAYPSLREA | 2278 | HLA-C*06:02 |
| 4580 | MAGEA4 | ENSG00000147381 | IAYPSLREA | 2278 | HLA-C*12:03 |
| 4581 | MAGEA4 | ENSG00000147381 | IAYPSLREA | 2278 | HLA-C*16:01 |
| 4582 | MAGEA4 | ENSG00000147381 | IAYPSLREA | 2278 | HLA-C*16:02 |
| 4583 | MAGEA4 | ENSG00000147381 | IFGKASESL | 2279 | HLA-C*01:02 |
| 4584 | MAGEA4 | ENSG00000147381 | IFGKASESL | 2279 | HLA-C*14:02 |
| 4585 | MAGEA4 | ENSG00000147381 | IFPKTGLLII | 2280 | HLA-A*24:02 |
| 4586 | MAGEA4 | ENSG00000147381 | IFPKTGLLI | 2281 | HLA-A*23:01 |
| 4587 | MAGEA4 | ENSG00000147381 | IFPKTGLLI | 2281 | HLA-A*24:02 |
| 4588 | MAGEA4 | ENSG00000147381 | IIVLGTIAM | 2282 | HLA-B*08:01 |
| 4589 | MAGEA4 | ENSG00000147381 | IIVLGTIAM | 2282 | HLA-B*15:01 |
| 4590 | MAGEA4 | ENSG00000147381 | IIVLGTIAM | 2282 | HLA-B*35:01 |
| 4591 | MAGEA4 | ENSG00000147381 | IIVLGTIAM | 2282 | HLA-B*35:03 |
| 4592 | MAGEA4 | ENSG00000147381 | IIVLGTIAM | 2282 | HLA-B*39:01 |
| 4593 | MAGEA4 | ENSG00000147381 | IIVLGTIAM | 2282 | HLA-B*46:01 |
| 4594 | MAGEA4 | ENSG00000147381 | IIVLGTIAM | 2282 | HLA-C*01:02 |
| 4595 | MAGEA4 | ENSG00000147381 | IIVLGTIAM | 2282 | HLA-C*03:03 |
| 4596 | MAGEA4 | ENSG00000147381 | IIVLGTIAM | 2282 | HLA-C*03:04 |
| 4597 | MAGEA4 | ENSG00000147381 | IIVLGTIAM | 2282 | HLA-C*07:04 |
| 4598 | MAGEA4 | ENSG00000147381 | IIVLGTIAM | 2282 | HLA-C*14:02 |
| 4599 | MAGEA4 | ENSG00000147381 | IVLGTIAMEG | 2283 | HLA-C*04:01 |
| 4600 | MAGEA4 | ENSG00000147381 | IVLGTIAM | 2284 | HLA-A*23:01 |
| 4601 | MAGEA4 | ENSG00000147381 | IVLGTIAM | 2284 | HLA-B*46:01 |
| 4602 | MAGEA4 | ENSG00000147381 | IVLGTIAM | 2284 | HLA-C*01:02 |
| 4603 | MAGEA4 | ENSG00000147381 | IVLGTIAM | 2284 | HLA-C*03:03 |
| 4604 | MAGEA4 | ENSG00000147381 | IVLGTIAM | 2284 | HLA-C*14:02 |
| 4605 | MAGEA4 | ENSG00000147381 | KAEMLERVI | 2285 | HLA-C*16:02 |
| 4606 | MAGEA4 | ENSG00000147381 | KASESLKMIF | 2286 | HLA-B*57:01 |
| 4607 | MAGEA4 | ENSG00000147381 | KASESLKMI | 2287 | HLA-C*16:02 |
| 4608 | MAGEA4 | ENSG00000147381 | KASESLKM | 2288 | HLA-B*37:01 |
| 4609 | MAGEA4 | ENSG00000147381 | KASESLKM | 2288 | HLA-B*58:01 |
| 4610 | MAGEA4 | ENSG00000147381 | KASESLKM | 2288 | HLA-C*03:04 |
| 4611 | MAGEA4 | ENSG00000147381 | KASESLKM | 2288 | HLA-C*16:01 |
| 4612 | MAGEA4 | ENSG00000147381 | KASESLKM | 2288 | HLA-C*16:02 |
| 4613 | MAGEA4 | ENSG00000147381 | KELVTKAEML | 2289 | HLA-A*30:01 |
| 4614 | MAGEA4 | ENSG00000147381 | KELVTKAEML | 2289 | HLA-B*40:01 |
| 4615 | MAGEA4 | ENSG00000147381 | KELVTKAEML | 2289 | HLA-B*40:02 |
| 4616 | MAGEA4 | ENSG00000147381 | KELVTKAEM | 2290 | HLA-A*30:01 |
| 4617 | MAGEA4 | ENSG00000147381 | KELVTKAEM | 2290 | HLA-B*18:01 |
| 4618 | MAGEA4 | ENSG00000147381 | KELVTKAEM | 2290 | HLA-B*37:01 |
| 4619 | MAGEA4 | ENSG00000147381 | KELVTKAEM | 2290 | HLA-B*40:01 |
| 4620 | MAGEA4 | ENSG00000147381 | KELVTKAEM | 2290 | HLA-B*40:02 |
| 4621 | MAGEA4 | ENSG00000147381 | KELVTKAEM | 2290 | HLA-B*44:02 |
| 4622 | MAGEA4 | ENSG00000147381 | KELVTKAEM | 2290 | HLA-B*44:03 |
| 4623 | MAGEA4 | ENSG00000147381 | KELVTKAEM | 2290 | HLA-B*49:01 |
| 4624 | MAGEA4 | ENSG00000147381 | KEVDPASNTYT | 2291 | HLA-B*40:01 |
| 4625 | MAGEA4 | ENSG00000147381 | KEVDPASNTYT | 2291 | HLA-B*49:01 |
| 4626 | MAGEA4 | ENSG00000147381 | KEVDPASNTY | 19 | HLA-A*25:01 |
| 4627 | MAGEA4 | ENSG00000147381 | KEVDPASNTY | 19 | HLA-A*26:01 |
| 4628 | MAGEA4 | ENSG00000147381 | KEVDPASNTY | 19 | HLA-A*29:02 |
| 4629 | MAGEA4 | ENSG00000147381 | KEVDPASNTY | 19 | HLA-A*30:01 |
| 4630 | MAGEA4 | ENSG00000147381 | KEVDPASNTY | 19 | HLA-A*30:02 |
| 4631 | MAGEA4 | ENSG00000147381 | KEVDPASNTY | 19 | HLA-A*32:01 |
| 4632 | MAGEA4 | ENSG00000147381 | KEVDPASNTY | 19 | HLA-B*15:01 |
| 4633 | MAGEA4 | ENSG00000147381 | KEVDPASNTY | 19 | HLA-B*15:03 |
| 4634 | MAGEA4 | ENSG00000147381 | KEVDPASNTY | 19 | HLA-B*18:01 |
| 4635 | MAGEA4 | ENSG00000147381 | KEVDPASNTY | 19 | HLA-B*27:02 |
| 4636 | MAGEA4 | ENSG00000147381 | KEVDPASNTY | 19 | HLA-B*27:05 |
| 4637 | MAGEA4 | ENSG00000147381 | KEVDPASNTY | 19 | HLA-B*37:01 |
| 4638 | MAGEA4 | ENSG00000147381 | KEVDPASNTY | 19 | HLA-B*39:01 |
| 4639 | MAGEA4 | ENSG00000147381 | KEVDPASNTY | 19 | HLA-B*40:01 |
| 4640 | MAGEA4 | ENSG00000147381 | KEVDPASNTY | 19 | HLA-B*40:02 |
| 4641 | MAGEA4 | ENSG00000147381 | KEVDPASNTY | 19 | HLA-B*44:02 |
| 4642 | MAGEA4 | ENSG00000147381 | KEVDPASNTY | 19 | HLA-B*44:03 |
| 4643 | MAGEA4 | ENSG00000147381 | KEVDPASNTY | 19 | HLA-B*46:01 |
| 4644 | MAGEA4 | ENSG00000147381 | KEVDPASNTY | 19 | HLA-B*49:01 |
| 4645 | MAGEA4 | ENSG00000147381 | KEVDPASNTY | 19 | HLA-B*57:01 |
| 4646 | MAGEA4 | ENSG00000147381 | KEVDPASNTY | 19 | HLA-B*58:01 |
| 4647 | MAGEA4 | ENSG00000147381 | KEVDPASNTY | 19 | HLA-C*02:02 |
| 4648 | MAGEA4 | ENSG00000147381 | KEVDPASNTY | 19 | HLA-C*12:03 |
| 4649 | MAGEA4 | ENSG00000147381 | KEVDPASNTY | 19 | HLA-C*14:02 |
| 4650 | MAGEA4 | ENSG00000147381 | KEVDPASNTY | 19 | HLA-C*16:01 |
| 4651 | MAGEA4 | ENSG00000147381 | KEVDPASNTY | 19 | HLA-C*16:02 |
| 4652 | MAGEA4 | ENSG00000147381 | KEVDPASNTY | 19 | HLA-C*16:04 |
| 4653 | MAGEA4 | ENSG00000147381 | KEVDPASNT | 2292 | HLA-B*40:01 |
| 4654 | MAGEA4 | ENSG00000147381 | KEVDPASNT | 2292 | HLA-B*49:01 |
| 4655 | MAGEA4 | ENSG00000147381 | KMIFGIDVKEV | 2293 | HLA-A*02:01 |
| 4656 | MAGEA4 | ENSG00000147381 | KVDELAHFLLR | 2294 | HLA-A*02:07 |
| 4657 | MAGEA4 | ENSG00000147381 | KVDELAHFLLR | 2294 | HLA-A*03:01 |
| 4658 | MAGEA4 | ENSG00000147381 | KVDELAHFLLR | 2294 | HLA-A*31:01 |
| 4659 | MAGEA4 | ENSG00000147381 | KVDELAHFLL | 16 | HLA-A*02:01 |
| 4660 | MAGEA4 | ENSG00000147381 | KVDELAHFLL | 16 | HLA-A*02:04 |
| 4661 | MAGEA4 | ENSG00000147381 | KVDELAHFLL | 16 | HLA-A*02:07 |
| 4662 | MAGEA4 | ENSG00000147381 | KVDELAHFLL | 16 | HLA-A*31:01 |
| 4663 | MAGEA4 | ENSG00000147381 | KVDELAHFL | 13 | HLA-A*02:01 |
| 4664 | MAGEA4 | ENSG00000147381 | KVDELAHFL | 13 | HLA-A*02:04 |
| 4665 | MAGEA4 | ENSG00000147381 | KVDELAHFL | 13 | HLA-A*02:07 |
| 4666 | MAGEA4 | ENSG00000147381 | KVDELAHFL | 13 | HLA-A*03:02 |
| 4667 | MAGEA4 | ENSG00000147381 | KVDELAHFL | 13 | HLA-A*31:01 |
| 4668 | MAGEA4 | ENSG00000147381 | KVDELAHFL | 13 | HLA-A*68:02 |
| 4669 | MAGEA4 | ENSG00000147381 | KVDELAHFL | 13 | HLA-B*13:02 |
| 4670 | MAGEA4 | ENSG00000147381 | KVDELAHFL | 13 | HLA-B*38:01 |
| 4671 | MAGEA4 | ENSG00000147381 | KVDELAHFL | 13 | HLA-B*58:01 |
| 4672 | MAGEA4 | ENSG00000147381 | KVDELAHFL | 13 | HLA-C*05:01 |
| 4673 | MAGEA4 | ENSG00000147381 | KVDELAHF | 2295 | HLA-C*05:01 |
| 4674 | MAGEA4 | ENSG00000147381 | KVLEHVVRVNA | 2296 | HLA-A*31:01 |
| 4675 | MAGEA4 | ENSG00000147381 | KVLEHVVRV | 2297 | HLA-A*02:01 |
| 4676 | MAGEA4 | ENSG00000147381 | KVLEHVVRV | 2297 | HLA-A*02:03 |
| 4677 | MAGEA4 | ENSG00000147381 | KVLEHVVRV | 2297 | HLA-A*02:04 |
| 4678 | MAGEA4 | ENSG00000147381 | KVLEHVVRV | 2297 | HLA-A*02:07 |
| 4679 | MAGEA4 | ENSG00000147381 | KVLEHVVRV | 2297 | HLA-A*03:01 |
| 4680 | MAGEA4 | ENSG00000147381 | KVLEHVVRV | 2297 | HLA-A*03:02 |
| 4681 | MAGEA4 | ENSG00000147381 | KVLEHVVRV | 2297 | HLA-A*31:01 |
| 4682 | MAGEA4 | ENSG00000147381 | KVLEHVVRV | 2297 | HLA-A*68:02 |
| 4683 | MAGEA4 | ENSG00000147381 | KVLEHVVRV | 2297 | HLA-B*13:02 |
| 4684 | MAGEA4 | ENSG00000147381 | KVLEHVVRV | 2297 | HLA-B*37:01 |
| 4685 | MAGEA4 | ENSG00000147381 | KVLEHVVRV | 2297 | HLA-B*55:01 |
| 4686 | MAGEA4 | ENSG00000147381 | KVLEHVVRV | 2297 | HLA-C*02:02 |
| 4687 | MAGEA4 | ENSG00000147381 | KVLEHVVR | 2298 | HLA-A*31:01 |
| 4688 | MAGEA4 | ENSG00000147381 | LAETSYVKV | 2299 | HLA-C*05:01 |
| 4689 | MAGEA4 | ENSG00000147381 | LAETSYVK | 2300 | HLA-B*27:02 |
| 4690 | MAGEA4 | ENSG00000147381 | LAHFLLRKY | 2301 | HLA-A*29:02 |
| 4691 | MAGEA4 | ENSG00000147381 | LEHVVRVNA | 2302 | HLA-B*40:02 |
| 4692 | MAGEA4 | ENSG00000147381 | LERVIKNY | 2303 | HLA-B*18:01 |
| 4693 | MAGEA4 | ENSG00000147381 | LGNNQIFPK | 2304 | HLA-A*03:02 |
| 4694 | MAGEA4 | ENSG00000147381 | LGNNQIFPK | 2304 | HLA-A*11:01 |
| 4695 | MAGEA4 | ENSG00000147381 | LGNNQIFPK | 2304 | HLA-B*27:02 |
| 4696 | MAGEA4 | ENSG00000147381 | LGNNQIFPK | 2304 | HLA-C*07:06 |
| 4697 | MAGEA4 | ENSG00000147381 | LGVMGVYDGR | 2305 | HLA-B*27:02 |
| 4698 | MAGEA4 | ENSG00000147381 | LIIVLGTIAM | 2306 | HLA-B*46:01 |
| 4699 | MAGEA4 | ENSG00000147381 | LLGNNQIFPK | 2307 | HLA-A*03:01 |
| 4700 | MAGEA4 | ENSG00000147381 | LLGNNQIFPK | 2307 | HLA-A*03:02 |
| 4701 | MAGEA4 | ENSG00000147381 | LLGNNQIFPK | 2307 | HLA-B*27:02 |
| 4702 | MAGEA4 | ENSG00000147381 | LLIIVLGTI | 2308 | HLA-A*02:03 |
| 4703 | MAGEA4 | ENSG00000147381 | LPTTISFTCW | 2309 | HLA-B*35:01 |
| 4704 | MAGEA4 | ENSG00000147381 | LPTTISFTCW | 2309 | HLA-B*51:01 |
| 4705 | MAGEA4 | ENSG00000147381 | LPTTISFTCW | 2309 | HLA-B*54:01 |
| 4706 | MAGEA4 | ENSG00000147381 | LPTTISFTC | 2310 | HLA-B*35:03 |
| 4707 | MAGEA4 | ENSG00000147381 | LPTTISFTC | 2310 | HLA-B*54:01 |
| 4708 | MAGEA4 | ENSG00000147381 | LPTTISFTC | 2310 | HLA-B*56:01 |
| 4709 | MAGEA4 | ENSG00000147381 | LSNKVDELAHF | 2311 | HLA-B*57:01 |
| 4710 | MAGEA4 | ENSG00000147381 | LSYDGLLGNN | 2312 | HLA-C*06:02 |
| 4711 | MAGEA4 | ENSG00000147381 | LSYDGLLGNN | 2312 | HLA-C*12:03 |
| 4712 | MAGEA4 | ENSG00000147381 | LTQDWVQENYL | 2079 | HLA-C*04:01 |
| 4713 | MAGEA4 | ENSG00000147381 | LTQDWVQENY | 2080 | HLA-A*01:01 |
| 4714 | MAGEA4 | ENSG00000147381 | LTQDWVQENY | 2080 | HLA-A*29:02 |
| 4715 | MAGEA4 | ENSG00000147381 | LTQDWVQENY | 2080 | HLA-A*30:02 |
| 4716 | MAGEA4 | ENSG00000147381 | LTQDWVQENY | 2080 | HLA-A*32:01 |
| 4717 | MAGEA4 | ENSG00000147381 | LTQDWVQENY | 2080 | HLA-B*57:01 |
| 4718 | MAGEA4 | ENSG00000147381 | LTQDWVQENY | 2080 | HLA-B*58:01 |
| 4719 | MAGEA4 | ENSG00000147381 | LTQDWVQENY | 2080 | HLA-C*07:01 |
| 4720 | MAGEA4 | ENSG00000147381 | LVPGTLEEV | 2313 | HLA-A*02:01 |
| 4721 | MAGEA4 | ENSG00000147381 | LVPGTLEEV | 2313 | HLA-A*02:07 |
| 4722 | MAGEA4 | ENSG00000147381 | LVTCLGLSY | 2314 | HLA-A*01:01 |
| 4723 | MAGEA4 | ENSG00000147381 | LVTCLGLSY | 2314 | HLA-A*26:01 |
| 4724 | MAGEA4 | ENSG00000147381 | LVTCLGLSY | 2314 | HLA-A*29:02 |
| 4725 | MAGEA4 | ENSG00000147381 | LVTCLGLSY | 2314 | HLA-A*30:02 |
| 4726 | MAGEA4 | ENSG00000147381 | MIFGIDVKEV | 2315 | HLA-A*02:01 |
| 4727 | MAGEA4 | ENSG00000147381 | MIFGIDVKEV | 2315 | HLA-A*02:03 |
| 4728 | MAGEA4 | ENSG00000147381 | MIFGIDVKEV | 2315 | HLA-A*02:04 |
| 4729 | MAGEA4 | ENSG00000147381 | MIFGIDVKEV | 2315 | HLA-A*02:07 |
| 4730 | MAGEA4 | ENSG00000147381 | MIFGIDVKEV | 2315 | HLA-A*68:02 |
| 4731 | MAGEA4 | ENSG00000147381 | MLERVIKNY | 2316 | HLA-A*01:01 |
| 4732 | MAGEA4 | ENSG00000147381 | MLERVIKNY | 2316 | HLA-A*29:02 |
| 4733 | MAGEA4 | ENSG00000147381 | MLERVIKNY | 2316 | HLA-A*30:02 |
| 4734 | MAGEA4 | ENSG00000147381 | MLERVIKNY | 2316 | HLA-B*44:02 |
| 4735 | MAGEA4 | ENSG00000147381 | NARVRIAY | 2317 | HLA-C*16:01 |
| 4736 | MAGEA4 | ENSG00000147381 | NKVDELAHF | 2318 | HLA-A*23:01 |
| 4737 | MAGEA4 | ENSG00000147381 | NKVDELAHF | 2318 | HLA-B*15:03 |
| 4738 | MAGEA4 | ENSG00000147381 | NQIFPKTGL | 2319 | HLA-B*13:02 |
| 4739 | MAGEA4 | ENSG00000147381 | NQIFPKTGL | 2319 | HLA-B*15:01 |
| 4740 | MAGEA4 | ENSG00000147381 | NQIFPKTGL | 2319 | HLA-B*15:03 |
| 4741 | MAGEA4 | ENSG00000147381 | NQIFPKTGL | 2319 | HLA-B*27:05 |
| 4742 | MAGEA4 | ENSG00000147381 | NQIFPKTGL | 2319 | HLA-B*38:01 |
| 4743 | MAGEA4 | ENSG00000147381 | NQIFPKTGL | 2319 | HLA-B*39:01 |
| 4744 | MAGEA4 | ENSG00000147381 | NTYTLVTCL | 2320 | HLA-A*23:01 |
| 4745 | MAGEA4 | ENSG00000147381 | NTYTLVTCL | 2320 | HLA-A*25:01 |
| 4746 | MAGEA4 | ENSG00000147381 | NTYTLVTCL | 2320 | HLA-A*26:01 |
| 4747 | MAGEA4 | ENSG00000147381 | NTYTLVTCL | 2320 | HLA-A*68:01 |
| 4748 | MAGEA4 | ENSG00000147381 | NTYTLVTCL | 2320 | HLA-A*68:02 |
| 4749 | MAGEA4 | ENSG00000147381 | NTYTLVTCL | 2320 | HLA-B*18:01 |
| 4750 | MAGEA4 | ENSG00000147381 | NTYTLVTCL | 2320 | HLA-B*39:01 |
| 4751 | MAGEA4 | ENSG00000147381 | NTYTLVTCL | 2320 | HLA-C*06:02 |
| 4752 | MAGEA4 | ENSG00000147381 | NTYTLVTCL | 2320 | HLA-C*07:06 |
| 4753 | MAGEA4 | ENSG00000147381 | NTYTLVTCL | 2320 | HLA-C*12:03 |
| 4754 | MAGEA4 | ENSG00000147381 | NYKRCFPVI | 2321 | HLA-A*24:02 |
| 4755 | MAGEA4 | ENSG00000147381 | PASNTYTL | 2322 | HLA-B*07:02 |
| 4756 | MAGEA4 | ENSG00000147381 | PASNTYTL | 2322 | HLA-C*07:02 |
| 4757 | MAGEA4 | ENSG00000147381 | PDAESLFR | 2323 | HLA-B*27:02 |
| 4758 | MAGEA4 | ENSG00000147381 | PLVPGTLEEV | 2324 | HLA-A*02:01 |
| 4759 | MAGEA4 | ENSG00000147381 | PLVPGTLEEV | 2324 | HLA-A*02:03 |
| 4760 | MAGEA4 | ENSG00000147381 | PRALAETSY | 2325 | HLA-B*15:03 |
| 4761 | MAGEA4 | ENSG00000147381 | PRALAETSY | 2325 | HLA-B*27:02 |
| 4762 | MAGEA4 | ENSG00000147381 | PRALAETSY | 2325 | HLA-C*07:01 |
| 4763 | MAGEA4 | ENSG00000147381 | PRALAETSY | 2325 | HLA-C*07:04 |
| 4764 | MAGEA4 | ENSG00000147381 | PTTISFTCW | 2326 | HLA-B*57:01 |
| 4765 | MAGEA4 | ENSG00000147381 | QDWVQENYL | 2106 | HLA-A*30:01 |
| 4766 | MAGEA4 | ENSG00000147381 | QDWVQENYL | 2106 | HLA-B*37:01 |
| 4767 | MAGEA4 | ENSG00000147381 | QDWVQENY | 2327 | HLA-B*18:01 |
| 4768 | MAGEA4 | ENSG00000147381 | QEAAVSSSSPL | 2328 | HLA-A*30:01 |
| 4769 | MAGEA4 | ENSG00000147381 | QEAAVSSSSPL | 2328 | HLA-B*40:01 |
| 4770 | MAGEA4 | ENSG00000147381 | QEEALGLVGA | 2329 | HLA-A*30:01 |
| 4771 | MAGEA4 | ENSG00000147381 | QEEALGLVGA | 2329 | HLA-B*40:02 |
| 4772 | MAGEA4 | ENSG00000147381 | QEEALGLVGA | 2329 | HLA-B*49:01 |
| 4773 | MAGEA4 | ENSG00000147381 | QEEALGLV | 2330 | HLA-B*49:01 |
| 4774 | MAGEA4 | ENSG00000147381 | QIFPKTGLLII | 2331 | HLA-A*02:01 |
| 4775 | MAGEA4 | ENSG00000147381 | QIFPKTGLLII | 2331 | HLA-A*02:03 |
| 4776 | MAGEA4 | ENSG00000147381 | QIFPKTGLLII | 2331 | HLA-A*02:04 |
| 4777 | MAGEA4 | ENSG00000147381 | QIFPKTGLL | 2332 | HLA-A*02:03 |
| 4778 | MAGEA4 | ENSG00000147381 | QIFPKTGLL | 2332 | HLA-A*03:01 |
| 4779 | MAGEA4 | ENSG00000147381 | QIFPKTGL | 2333 | HLA-B*08:01 |
| 4780 | MAGEA4 | ENSG00000147381 | QSPQGASAL | 127 | HLA-C*01:02 |
| 4781 | MAGEA4 | ENSG00000147381 | QVPGSNPARY | 2334 | HLA-A*01:01 |
| 4782 | MAGEA4 | ENSG00000147381 | QVPGSNPARY | 2334 | HLA-A*25:01 |
| 4783 | MAGEA4 | ENSG00000147381 | QVPGSNPARY | 2334 | HLA-A*26:01 |
| 4784 | MAGEA4 | ENSG00000147381 | QVPGSNPARY | 2334 | HLA-A*29:02 |
| 4785 | MAGEA4 | ENSG00000147381 | QVPGSNPARY | 2334 | HLA-A*30:02 |
| 4786 | MAGEA4 | ENSG00000147381 | QVPGSNPARY | 2334 | HLA-A*32:01 |
| 4787 | MAGEA4 | ENSG00000147381 | QVPGSNPARY | 2334 | HLA-A*68:01 |
| 4788 | MAGEA4 | ENSG00000147381 | QVPGSNPARY | 2334 | HLA-C*07:04 |
| 4789 | MAGEA4 | ENSG00000147381 | QVPGSNPAR | 2335 | HLA-A*68:01 |
| 4790 | MAGEA4 | ENSG00000147381 | RAKELVTKA | 2336 | HLA-B*54:01 |
| 4791 | MAGEA4 | ENSG00000147381 | RAKELVTKA | 2336 | HLA-B*55:01 |
| 4792 | MAGEA4 | ENSG00000147381 | RALAETSYVK | 2337 | HLA-A*03:02 |
| 4793 | MAGEA4 | ENSG00000147381 | RALAETSYVK | 2337 | HLA-B*27:02 |
| 4794 | MAGEA4 | ENSG00000147381 | RCFPVIFGK | 2338 | HLA-A*03:01 |
| 4795 | MAGEA4 | ENSG00000147381 | RCFPVIFGK | 2338 | HLA-A*03:02 |
| 4796 | MAGEA4 | ENSG00000147381 | RCFPVIFGK | 2338 | HLA-A*11:01 |
| 4797 | MAGEA4 | ENSG00000147381 | RCFPVIFGK | 2338 | HLA-A*31:01 |
| 4798 | MAGEA4 | ENSG00000147381 | RCFPVIFGK | 2338 | HLA-B*57:01 |
| 4799 | MAGEA4 | ENSG00000147381 | REALSNKVDEL | 2339 | HLA-A*30:01 |
| 4800 | MAGEA4 | ENSG00000147381 | REALSNKVDEL | 2339 | HLA-B*40:01 |
| 4801 | MAGEA4 | ENSG00000147381 | REALSNKV | 2340 | HLA-B*37:01 |
| 4802 | MAGEA4 | ENSG00000147381 | REALSNKV | 2340 | HLA-B*49:01 |
| 4803 | MAGEA4 | ENSG00000147381 | RIAYPSLREA | 2341 | HLA-A*02:03 |
| 4804 | MAGEA4 | ENSG00000147381 | RQVPGSNPARY | 14 | HLA-A*29:02 |
| 4805 | MAGEA4 | ENSG00000147381 | RQVPGSNPARY | 14 | HLA-A*30:02 |
| 4806 | MAGEA4 | ENSG00000147381 | RQVPGSNPARY | 14 | HLA-A*32:01 |
| 4807 | MAGEA4 | ENSG00000147381 | RQVPGSNPARY | 14 | HLA-B*15:01 |
| 4808 | MAGEA4 | ENSG00000147381 | RQVPGSNPARY | 14 | HLA-B*15:03 |
| 4809 | MAGEA4 | ENSG00000147381 | RQVPGSNPARY | 14 | HLA-B*44:03 |
| 4810 | MAGEA4 | ENSG00000147381 | RQVPGSNPARY | 14 | HLA-B*57:01 |
| 4811 | MAGEA4 | ENSG00000147381 | RQVPGSNPARY | 14 | HLA-B*58:01 |
| 4812 | MAGEA4 | ENSG00000147381 | RQVPGSNPARY | 14 | HLA-C*02:02 |
| 4813 | MAGEA4 | ENSG00000147381 | RQVPGSNPARY | 14 | HLA-C*07:04 |
| 4814 | MAGEA4 | ENSG00000147381 | RQVPGSNPARY | 14 | HLA-C*16:02 |
| 4815 | MAGEA4 | ENSG00000147381 | RQVPGSNPARY | 14 | HLA-C*16:04 |
| 4816 | MAGEA4 | ENSG00000147381 | RQVPGSNPAR | 2342 | HLA-A*31:01 |
| 4817 | MAGEA4 | ENSG00000147381 | RV1KNYKR | 2343 | HLA-A*31:01 |
| 4818 | MAGEA4 | ENSG00000147381 | RVNARVRIAY | 2344 | HLA-A*32:01 |
| 4819 | MAGEA4 | ENSG00000147381 | RVRIAYPSLR | 2345 | HLA-A*03:01 |
| 4820 | MAGEA4 | ENSG00000147381 | RVRIAYPSLR | 2345 | HLA-A*31:01 |
| 4821 | MAGEA4 | ENSG00000147381 | RVRIAYPSL | 2346 | HLA-B*07:02 |
| 4822 | MAGEA4 | ENSG00000147381 | SAGPPQSPQGA | 2347 | HLA-C*12:03 |
| 4823 | MAGEA4 | ENSG00000147381 | SAGPPQSPQ | 2348 | HLA-C*03:03 |
| 4824 | MAGEA4 | ENSG00000147381 | SALPTTISF | 15 | HLA-A*02:01 |
| 4825 | MAGEA4 | ENSG00000147381 | SALPTTISF | 15 | HLA-A*02:04 |
| 4826 | MAGEA4 | ENSG00000147381 | SALPTTISF | 15 | HLA-A*02:07 |
| 4827 | MAGEA4 | ENSG00000147381 | SALPTTISF | 15 | HLA-A*11:01 |
| 4828 | MAGEA4 | ENSG00000147381 | SALPTTISF | 15 | HLA-A*23:01 |
| 4829 | MAGEA4 | ENSG00000147381 | SALPTTISF | 15 | HLA-A*24:02 |
| 4830 | MAGEA4 | ENSG00000147381 | SALPTTISF | 15 | HLA-A*25:01 |
| 4831 | MAGEA4 | ENSG00000147381 | SALPTTISF | 15 | HLA-A*26:01 |
| 4832 | MAGEA4 | ENSG00000147381 | SALPTTISF | 15 | HLA-A*29:02 |
| 4833 | MAGEA4 | ENSG00000147381 | SALPTTISF | 15 | HLA-A*30:01 |
| 4834 | MAGEA4 | ENSG00000147381 | SALPTTISF | 15 | HLA-A*30:02 |
| 4835 | MAGEA4 | ENSG00000147381 | SALPTTISF | 15 | HLA-A*31:01 |
| 4836 | MAGEA4 | ENSG00000147381 | SALPTTISF | 15 | HLA-A*32:01 |
| 4837 | MAGEA4 | ENSG00000147381 | SALPTTISF | 15 | HLA-A*33:01 |
| 4838 | MAGEA4 | ENSG00000147381 | SALPTTISF | 15 | HLA-A*33:03 |
| 4839 | MAGEA4 | ENSG00000147381 | SALPTTISF | 15 | HLA-A*68:01 |
| 4840 | MAGEA4 | ENSG00000147381 | SALPTTISF | 15 | HLA-B*07:02 |
| 4841 | MAGEA4 | ENSG00000147381 | SALPTTISF | 15 | HLA-B*08:01 |
| 4842 | MAGEA4 | ENSG00000147381 | SALPTTISF | 15 | HLA-B*15:01 |
| 4843 | MAGEA4 | ENSG00000147381 | SALPTTISF | 15 | HLA-B*15:03 |
| 4844 | MAGEA4 | ENSG00000147381 | SALPTTISF | 15 | HLA-B*18:01 |
| 4845 | MAGEA4 | ENSG00000147381 | SALPTTISF | 15 | HLA-B*27:02 |
| 4846 | MAGEA4 | ENSG00000147381 | SALPTTISF | 15 | HLA-B*35:01 |
| 4847 | MAGEA4 | ENSG00000147381 | SALPTTISF | 15 | HLA-B*35:03 |
| 4848 | MAGEA4 | ENSG00000147381 | SALPTTISF | 15 | HLA-B*37:01 |
| 4849 | MAGEA4 | ENSG00000147381 | SALPTTISF | 15 | HLA-B*38:01 |
| 4850 | MAGEA4 | ENSG00000147381 | SALPTTISF | 15 | HLA-B*39:01 |
| 4851 | MAGEA4 | ENSG00000147381 | SALPTTISF | 15 | HLA-B*44:02 |
| 4852 | MAGEA4 | ENSG00000147381 | SALPTTISF | 15 | HLA-B*44:03 |
| 4853 | MAGEA4 | ENSG00000147381 | SALPTTISF | 15 | HLA-B*46:01 |
| 4854 | MAGEA4 | ENSG00000147381 | SALPTTISF | 15 | HLA-B*51:01 |
| 4855 | MAGEA4 | ENSG00000147381 | SALPTTISF | 15 | HLA-B*54:01 |
| 4856 | MAGEA4 | ENSG00000147381 | SALPTTISF | 15 | HLA-B*55:01 |
| 4857 | MAGEA4 | ENSG00000147381 | SALPTTISF | 15 | HLA-B*56:01 |
| 4858 | MAGEA4 | ENSG00000147381 | SALPTTISF | 15 | HLA-B*57:01 |
| 4859 | MAGEA4 | ENSG00000147381 | SALPTTISF | 15 | HLA-B*58:01 |
| 4860 | MAGEA4 | ENSG00000147381 | SALPTTISF | 15 | HLA-C*01:02 |
| 4861 | MAGEA4 | ENSG00000147381 | SALPTTISF | 15 | HLA-C*02:02 |
| 4862 | MAGEA4 | ENSG00000147381 | SALPTTISF | 15 | HLA-C*03:03 |
| 4863 | MAGEA4 | ENSG00000147381 | SALPTTISF | 15 | HLA-C*03:04 |
| 4864 | MAGEA4 | ENSG00000147381 | SALPTTISF | 15 | HLA-C*04:01 |
| 4865 | MAGEA4 | ENSG00000147381 | SALPTTISF | 15 | HLA-C*05:01 |
| 4866 | MAGEA4 | ENSG00000147381 | SALPTTISF | 15 | HLA-C*07:02 |
| 4867 | MAGEA4 | ENSG00000147381 | SALPTTISF | 15 | HLA-C*07:04 |
| 4868 | MAGEA4 | ENSG00000147381 | SALPTTISF | 15 | HLA-C*07:06 |
| 4869 | MAGEA4 | ENSG00000147381 | SALPTTISF | 15 | HLA-C*12:03 |
| 4870 | MAGEA4 | ENSG00000147381 | SALPTTISF | 15 | HLA-C*14:02 |
| 4871 | MAGEA4 | ENSG00000147381 | SALPTTISF | 15 | HLA-C*16:01 |
| 4872 | MAGEA4 | ENSG00000147381 | SALPTTISF | 15 | HLA-C*16:02 |
| 4873 | MAGEA4 | ENSG00000147381 | SALPTTISF | 15 | HLA-C*16:04 |
| 4874 | MAGEA4 | ENSG00000147381 | SEEEIWEEL | 2349 | HLA-A*30:01 |
| 4875 | MAGEA4 | ENSG00000147381 | SEEEIWEEL | 2349 | HLA-B*40:01 |
| 4876 | MAGEA4 | ENSG00000147381 | SESLKMIF | 2350 | HLA-B*18:01 |
| 4877 | MAGEA4 | ENSG00000147381 | SESLKMIF | 2350 | HLA-B*37:01 |
| 4878 | MAGEA4 | ENSG00000147381 | SESLKMIF | 2350 | HLA-B*44:02 |
| 4879 | MAGEA4 | ENSG00000147381 | SESLKMIF | 2350 | HLA-B*44:03 |
| 4880 | MAGEA4 | ENSG00000147381 | SLFREALSNK | 2351 | HLA-A*03:01 |
| 4881 | MAGEA4 | ENSG00000147381 | SLFREALSNK | 2351 | HLA-A*03:02 |
| 4882 | MAGEA4 | ENSG00000147381 | SPDAESLFREA | 2352 | HLA-B*54:01 |
| 4883 | MAGEA4 | ENSG00000147381 | SPDAESLFREA | 2352 | HLA-B*55:01 |
| 4884 | MAGEA4 | ENSG00000147381 | SPDAESLFREA | 2352 | HLA-B*56:01 |
| 4885 | MAGEA4 | ENSG00000147381 | SPDAESLF | 2353 | HLA-B*55:01 |
| 4886 | MAGEA4 | ENSG00000147381 | SPDAESLF | 2353 | HLA-C*05:01 |
| 4887 | MAGEA4 | ENSG00000147381 | SPLVPGTLEEV | 2354 | HLA-B*56:01 |
| 4888 | MAGEA4 | ENSG00000147381 | SPLVPGTL | 2355 | HLA-B*07:02 |
| 4889 | MAGEA4 | ENSG00000147381 | SPLVPGTL | 2355 | HLA-B*08:01 |
| 4890 | MAGEA4 | ENSG00000147381 | SPLVPGTL | 2355 | HLA-C*07:02 |
| 4891 | MAGEA4 | ENSG00000147381 | SPQGASAL | 2356 | HLA-B*07:02 |
| 4892 | MAGEA4 | ENSG00000147381 | SPQGASAL | 2356 | HLA-C*07:02 |
| 4893 | MAGEA4 | ENSG00000147381 | SSPLVPGTL | 2357 | HLA-B*07:02 |
| 4894 | MAGEA4 | ENSG00000147381 | SSPLVPGTL | 2357 | HLA-B*46:01 |
| 4895 | MAGEA4 | ENSG00000147381 | SSPLVPGTL | 2357 | HLA-B*58:01 |
| 4896 | MAGEA4 | ENSG00000147381 | SSPLVPGTL | 2357 | HLA-C*01:02 |
| 4897 | MAGEA4 | ENSG00000147381 | SSPLVPGTL | 2357 | HLA-C*03:04 |
| 4898 | MAGEA4 | ENSG00000147381 | SSPLVPGTL | 2357 | HLA-C*07:02 |
| 4899 | MAGEA4 | ENSG00000147381 | STSPDAESLFR | 2358 | HLA-A*11:01 |
| 4900 | MAGEA4 | ENSG00000147381 | STSPDAESLFR | 2358 | HLA-A*68:01 |
| 4901 | MAGEA4 | ENSG00000147381 | STSPDAESLFR | 2358 | HLA-C*07:06 |
| 4902 | MAGEA4 | ENSG00000147381 | SYDGLLGNNQI | 2359 | HLA-A*23:01 |
| 4903 | MAGEA4 | ENSG00000147381 | SYDGLLGNNQI | 2359 | HLA-A*24:02 |
| 4904 | MAGEA4 | ENSG00000147381 | SYDGLLGNNQI | 2359 | HLA-B*35:03 |
| 4905 | MAGEA4 | ENSG00000147381 | SYDGLLGNNQI | 2359 | HLA-B*38:01 |
| 4906 | MAGEA4 | ENSG00000147381 | SYDGLLGNNQI | 2359 | HLA-C*04:01 |
| 4907 | MAGEA4 | ENSG00000147381 | SYDGLLGNN | 2360 | HLA-C*04:01 |
| 4908 | MAGEA4 | ENSG00000147381 | SYVKVLEHV | 2361 | HLA-A*23:01 |
| 4909 | MAGEA4 | ENSG00000147381 | SYVKVLEHV | 2361 | HLA-A*24:02 |
| 4910 | MAGEA4 | ENSG00000147381 | TLVTCLGLSY | 2362 | HLA-A*29:02 |
| 4911 | MAGEA4 | ENSG00000147381 | TQDWVQENYL | 2158 | HLA-B*38:01 |
| 4912 | MAGEA4 | ENSG00000147381 | TQDWVQENYL | 2158 | HLA-C*05:01 |
| 4913 | MAGEA4 | ENSG00000147381 | TQDWVQENY | 2159 | HLA-A*01:01 |
| 4914 | MAGEA4 | ENSG00000147381 | TQDWVQENY | 2159 | HLA-A*30:02 |
| 4915 | MAGEA4 | ENSG00000147381 | TQDWVQENY | 2159 | HLA-B*15:01 |
| 4916 | MAGEA4 | ENSG00000147381 | TQDWVQENY | 2159 | HLA-B*15:03 |
| 4917 | MAGEA4 | ENSG00000147381 | TQDWVQENY | 2159 | HLA-B*38:01 |
| 4918 | MAGEA4 | ENSG00000147381 | TQDWVQENY | 2159 | HLA-B*39:01 |
| 4919 | MAGEA4 | ENSG00000147381 | TQDWVQENY | 2159 | HLA-C*05:01 |
| 4920 | MAGEA4 | ENSG00000147381 | TSPDAESLFR | 2363 | HLA-A*68:01 |
| 4921 | MAGEA4 | ENSG00000147381 | TSPDAESLFR | 2363 | HLA-B*27:02 |
| 4922 | MAGEA4 | ENSG00000147381 | TSPDAESLF | 2364 | HLA-C*01:02 |
| 4923 | MAGEA4 | ENSG00000147381 | TSPDAESLF | 2364 | HLA-C*05:01 |
| 4924 | MAGEA4 | ENSG00000147381 | TSPDAESL | 2365 | HLA-C*01:02 |
| 4925 | MAGEA4 | ENSG00000147381 | TSYVKVLEHV | 2366 | HLA-A*68:02 |
| 4926 | MAGEA4 | ENSG00000147381 | TSYVKVLEH | 2367 | HLA-A*03:01 |
| 4927 | MAGEA4 | ENSG00000147381 | TSYVKVLEH | 2367 | HLA-A*11:01 |
| 4928 | MAGEA4 | ENSG00000147381 | TSYVKVLEH | 2367 | HLA-C*02:02 |
| 4929 | MAGEA4 | ENSG00000147381 | TSYVKVLEH | 2367 | HLA-C*07:06 |
| 4930 | MAGEA4 | ENSG00000147381 | TSYVKVLEH | 2367 | HLA-C*12:03 |
| 4931 | MAGEA4 | ENSG00000147381 | TTEEQEAAV | 2368 | HLA-C*05:01 |
| 4932 | MAGEA4 | ENSG00000147381 | TTISFTCWR | 2369 | HLA-A*31:01 |
| 4933 | MAGEA4 | ENSG00000147381 | TTISFTCW | 2370 | HLA-A*25:01 |
| 4934 | MAGEA4 | ENSG00000147381 | TTISFTCW | 2370 | HLA-B*57:01 |
| 4935 | MAGEA4 | ENSG00000147381 | TVYGEPRKL | 2371 | HLA-A*02:03 |
| 4936 | MAGEA4 | ENSG00000147381 | TVYGEPRKL | 2371 | HLA-A*03:01 |
| 4937 | MAGEA4 | ENSG00000147381 | TVYGEPRKL | 2371 | HLA-A*68:02 |
| 4938 | MAGEA4 | ENSG00000147381 | TVYGEPRKL | 2371 | HLA-C*02:02 |
| 4939 | MAGEA4 | ENSG00000147381 | TVYGEPRKL | 2371 | HLA-C*03:04 |
| 4940 | MAGEA4 | ENSG00000147381 | TVYGEPRKL | 2371 | HLA-C*06:02 |
| 4941 | MAGEA4 | ENSG00000147381 | TVYGEPRKL | 2371 | HLA-C*12:03 |
| 4942 | MAGEA4 | ENSG00000147381 | TYTLVTCL | 2372 | HLA-A*23:01 |
| 4943 | MAGEA4 | ENSG00000147381 | TYTLVTCL | 2372 | HLA-A*24:02 |
| 4944 | MAGEA4 | ENSG00000147381 | TYTLVTCL | 2372 | HLA-C*14:02 |
| 4945 | MAGEA4 | ENSG00000147381 | VDELAHFL | 2373 | HLA-B*37:01 |
| 4946 | MAGEA4 | ENSG00000147381 | VDELAHFL | 2373 | HLA-B*40:02 |
| 4947 | MAGEA4 | ENSG00000147381 | VDELAHFL | 2373 | HLA-C*07:04 |
| 4948 | MAGEA4 | ENSG00000147381 | VDPASNTY | 2374 | HLA-B*15:03 |
| 4949 | MAGEA4 | ENSG00000147381 | VDPASNTY | 2374 | HLA-B*37:01 |
| 4950 | MAGEA4 | ENSG00000147381 | VDPASNTY | 2374 | HLA-B*39:01 |
| 4951 | MAGEA4 | ENSG00000147381 | VDPASNTY | 2374 | HLA-C*01:02 |
| 4952 | MAGEA4 | ENSG00000147381 | VDPASNTY | 2374 | HLA-C*04:01 |
| 4953 | MAGEA4 | ENSG00000147381 | VDPASNTY | 2374 | HLA-C*07:01 |
| 4954 | MAGEA4 | ENSG00000147381 | VDPASNTY | 2374 | HLA-C*I2:03 |
| 4955 | MAGEA4 | ENSG00000147381 | VDPASNTY | 2374 | HLA-C*14:02 |
| 4956 | MAGEA4 | ENSG00000147381 | VDPASNTY | 2374 | HLA-C*16:02 |
| 4957 | MAGEA4 | ENSG00000147381 | VEAQEEALGLV | 2375 | HLA-B*49:01 |
| 4958 | MAGEA4 | ENSG00000147381 | VEAQEEALGL | 2376 | HLA-A*30:01 |
| 4959 | MAGEA4 | ENSG00000147381 | VEAQEEALGL | 2376 | HLA-B*40:01 |
| 4960 | MAGEA4 | ENSG00000147381 | VEAQEEAL | 2377 | HLA-A*30:01 |
| 4961 | MAGEA4 | ENSG00000147381 | VEAQEEAL | 2377 | HLA-B*40:01 |
| 4962 | MAGEA4 | ENSG00000147381 | VIFGKASESLK | 2378 | HLA-A*03:01 |
| 4963 | MAGEA4 | ENSG00000147381 | VIFGKASESLK | 2378 | HLA-A*03:02 |
| 4964 | MAGEA4 | ENSG00000147381 | VIFGKASESLK | 2378 | HLA-A*11:01 |
| 4965 | MAGEA4 | ENSG00000147381 | VIFGKASESL | 2379 | HLA-C*01:02 |
| 4966 | MAGEA4 | ENSG00000147381 | VKEVDPASNTY | 2380 | HLA-B*15:03 |
| 4967 | MAGEA4 | ENSG00000147381 | VNARVRIAY | 2381 | HLA-A*32:01 |
| 4968 | MAGEA4 | ENSG00000147381 | VNARVRIAY | 2381 | HLA-C*16:01 |
| 4969 | MAGEA4 | ENSG00000147381 | VPGSNPARYEF | 2382 | HLA-B*35:01 |
| 4970 | MAGEA4 | ENSG00000147381 | VPGSNPARY | 2383 | HLA-A*29:02 |
| 4971 | MAGEA4 | ENSG00000147381 | VPGSNPARY | 2383 | HLA-A*30:02 |
| 4972 | MAGEA4 | ENSG00000147381 | VPGSNPARY | 2383 | HLA-B*35:01 |
| 4973 | MAGEA4 | ENSG00000147381 | VPGSNPARY | 2383 | HLA-B*55:01 |
| 4974 | MAGEA4 | ENSG00000147381 | VPGTLEEV | 2384 | HLA-B*56:01 |
| 4975 | MAGEA4 | ENSG00000147381 | VQENYLEY | 2174 | HLA-A*01:01 |
| 4976 | MAGEA4 | ENSG00000147381 | VQENYLEY | 2174 | HLA-B*15:01 |
| 4977 | MAGEA4 | ENSG00000147381 | VQENYLEY | 2174 | HLA-B*15:03 |
| 4978 | MAGEA4 | ENSG00000147381 | VQENYLEY | 2174 | HLA-B*39:01 |
| 4979 | MAGEA4 | ENSG00000147381 | VQENYLEY | 2174 | HLA-C*07:01 |
| 4980 | MAGEA4 | ENSG00000147381 | VRIAYPSLR | 2385 | HLA-B*27:05 |
| 4981 | MAGEA4 | ENSG00000147381 | VTCLGLSY | 2386 | HLA-A*01:01 |
| 4982 | MAGEA4 | ENSG00000147381 | VTCLGLSY | 2386 | HLA-C*07:01 |
| 4983 | MAGEA4 | ENSG00000147381 | VTKAEMLER | 2387 | HLA-A*03:01 |
| 4984 | MAGEA4 | ENSG00000147381 | VTKAEMLER | 2387 | HLA-A*11:01 |
| 4985 | MAGEA4 | ENSG00000147381 | VTKAEMLER | 2387 | HLA-A*31:01 |
| 4986 | MAGEA4 | ENSG00000147381 | VTKAEMLER | 2387 | HLA-A*33:01 |
| 4987 | MAGEA4 | ENSG00000147381 | VTKAEMLER | 2387 | HLA-A*33:03 |
| 4988 | MAGEA4 | ENSG00000147381 | VTKAEMLER | 2387 | HLA-A*68:01 |
| 4989 | MAGEA4 | ENSG00000147381 | VTKAEMLER | 2387 | HLA-B*57:01 |
| 4990 | MAGEA4 | ENSG00000147381 | VTKAEMLER | 2387 | HLA-C*07:06 |
| 4991 | MAGEA4 | ENSG00000147381 | VYDGREHTVY | 2388 | HLA-A*24:02 |
| 4992 | MAGEA4 | ENSG00000147381 | VYDGREHTVY | 2388 | HLA-A*29:02 |
| 4993 | MAGEA4 | ENSG00000147381 | VYDGREHTVY | 2388 | HLA-B*35:01 |
| 4994 | MAGEA4 | ENSG00000147381 | VYDGREHTVY | 2388 | HLA-B*55:01 |
| 4995 | MAGEA4 | ENSG00000147381 | VYDGREHTVY | 2388 | HLA-C*04:01 |
| 4996 | MAGEA4 | ENSG00000147381 | VYDGREHTVY | 2388 | HLA-C*07:01 |
| 4997 | MAGEA4 | ENSG00000147381 | VYDGREHTV | 2389 | HLA-A*02:01 |
| 4998 | MAGEA4 | ENSG00000147381 | VYDGREHTV | 2389 | HLA-A*02:07 |
| 4999 | MAGEA4 | ENSG00000147381 | VYDGREHTV | 2389 | HLA-A*23:01 |
| 5000 | MAGEA4 | ENSG00000147381 | VYDGREHTV | 2389 | HLA-A*24:02 |
| 5001 | MAGEA4 | ENSG00000147381 | VYDGREHTV | 2389 | HLA-A*32:01 |
| 5002 | MAGEA4 | ENSG00000147381 | VYDGREHTV | 2389 | HLA-B*08:01 |
| 5003 | MAGEA4 | ENSG00000147381 | VYDGREHTV | 2389 | HLA-B*35:01 |
| 5004 | MAGEA4 | ENSG00000147381 | VYDGREHTV | 2389 | HLA-B*35:03 |
| 5005 | MAGEA4 | ENSG00000147381 | VYDGREHTV | 2389 | HLA-B*38:01 |
| 5006 | MAGEA4 | ENSG00000147381 | VYDGREHTV | 2389 | HLA-B*51:01 |
| 5007 | MAGEA4 | ENSG00000147381 | VYDGREHTV | 2389 | HLA-B*55:01 |
| 5008 | MAGEA4 | ENSG00000147381 | VYDGREHTV | 2389 | HLA-C*01:02 |
| 5009 | MAGEA4 | ENSG00000147381 | VYDGREHTV | 2389 | HLA-C*03:04 |
| 5010 | MAGEA4 | ENSG00000147381 | VYDGREHTV | 2389 | HLA-C*04:01 |
| 5011 | MAGEA4 | ENSG00000147381 | VYDGREHTV | 2389 | HLA-C*05:01 |
| 5012 | MAGEA4 | ENSG00000147381 | VYDGREHTV | 2389 | HLA-C*14:02 |
| 5013 | MAGEA4 | ENSG00000147381 | VYDGREHTV | 2389 | HLA-C*16:01 |
| 5014 | MAGEA4 | ENSG00000147381 | VYDGREHTV | 2389 | HLA-C*16:02 |
| 5015 | MAGEA4 | ENSG00000147381 | VYGEPRKLL | 2390 | HLA-A*23:01 |
| 5016 | MAGEA4 | ENSG00000147381 | VYGEPRKLL | 2390 | HLA-A*24:02 |
| 5017 | MAGEA4 | ENSG00000147381 | VYGEPRKL | 2391 | HLA-A*23:01 |
| 5018 | MAGEA4 | ENSG00000147381 | VYGEPRKL | 2391 | HLA-A*24:02 |
| 5019 | MAGEA4 | ENSG00000147381 | WEELGVMGV | 2392 | HLA-B*40:02 |
| 5020 | MAGEA4 | ENSG00000147381 | WEELGVMGV | 2392 | HLA-B*49:01 |
| 5021 | MAGEA4 | ENSG00000147381 | WVQENYLEY | 75 | HLA-A*01:01 |
| 5022 | MAGEA4 | ENSG00000147381 | WVQENYLEY | 75 | HLA-A*03:01 |
| 5023 | MAGEA4 | ENSG00000147381 | WVQENYLEY | 75 | HLA-A*25:01 |
| 5024 | MAGEA4 | ENSG00000147381 | WVQENYLEY | 75 | HLA-A*26:01 |
| 5025 | MAGEA4 | ENSG00000147381 | WVQENYLEY | 75 | HLA-A*29:02 |
| 5026 | MAGEA4 | ENSG00000147381 | WVQENYLEY | 75 | HLA-A*30:02 |
| 5027 | MAGEA4 | ENSG00000147381 | WVQENYLEY | 75 | HLA-B*15:01 |
| 5028 | MAGEA4 | ENSG00000147381 | WVQENYLEY | 75 | HLA-B*35:01 |
| 5029 | MAGEA4 | ENSG00000147381 | WVQENYLEY | 75 | HLA-B*46:01 |
| 5030 | MAGEA4 | ENSG00000147381 | WVQENYLEY | 75 | HLA-C*07:04 |
| 5031 | MAGEA4 | ENSG00000147381 | YDGLLGNNQIF | 2393 | HLA-C*07:01 |
| 5032 | MAGEA4 | ENSG00000147381 | YDGREHTVY | 2394 | HLA-A*01:01 |
| 5033 | MAGEA4 | ENSG00000147381 | YDGREHTVY | 2394 | HLA-A*29:02 |
| 5034 | MAGEA4 | ENSG00000147381 | YDGREHTVY | 2394 | HLA-C*07:01 |
| 5035 | MAGEA4 | ENSG00000147381 | YDGREHTV | 2395 | HLA-C*06:02 |
| 5036 | MAGEA4 | ENSG00000147381 | YDGREHTV | 2395 | HLA-C*07:01 |
| 5037 | MAGEA4 | ENSG00000147381 | YDGREHTV | 2395 | HLA-C*07:04 |
| 5038 | MAGEA4 | ENSG00000147381 | YEFLWGPRA | 2183 | HLA-A*02:04 |
| 5039 | MAGEA4 | ENSG00000147381 | YPSLREAALL | 2396 | HLA-B*07:02 |
| 5040 | MAGEA4 | ENSG00000147381 | YPSLREAAL | 2397 | HLA-B*07:02 |
| 5041 | MAGEA4 | ENSG00000147381 | YPSLREAAL | 2397 | HLA-B*08:01 |
| 5042 | MAGEA4 | ENSG00000147381 | YPSLREAAL | 2397 | HLA-B*35:01 |
| 5043 | MAGEA4 | ENSG00000147381 | YPSLREAAL | 2397 | HLA-B*35:03 |
| 5044 | MAGEA4 | ENSG00000147381 | YPSLREAAL | 2397 | HLA-B*37:01 |
| 5045 | MAGEA4 | ENSG00000147381 | YPSLREAAL | 2397 | HLA-B*39:01 |
| 5046 | MAGEA4 | ENSG00000147381 | YPSLREAAL | 2397 | HLA-B*40:01 |
| 5047 | MAGEA4 | ENSG00000147381 | YPSLREAAL | 2397 | HLA-B*51:01 |
| 5048 | MAGEA4 | ENSG00000147381 | YPSLREAAL | 2397 | HLA-B*54:01 |
| 5049 | MAGEA4 | ENSG00000147381 | YPSLREAAL | 2397 | HLA-B*55:01 |
| 5050 | MAGEA4 | ENSG00000147381 | YPSLREAAL | 2397 | HLA-B*56:01 |
| 5051 | MAGEA4 | ENSG00000147381 | YPSLREAAL | 2397 | HLA-C*01:02 |
| 5052 | MAGEA4 | ENSG00000147381 | YPSLREAAL | 2397 | HLA-C*03:03 |
| 5053 | MAGEA4 | ENSG00000147381 | YPSLREAAL | 2397 | HLA-C*03:04 |
| 5054 | MAGEA4 | ENSG00000147381 | YPSLREAAL | 2397 | HLA-C*07:02 |
| 5055 | MAGEA4 | ENSG00000147381 | YPSLREAAL | 2397 | HLA-C*14:02 |
| 5056 | MAGEA4 | ENSG00000147381 | YPSLREAAL | 2397 | HLA-C*16:01 |
| 5057 | MAGEA4 | ENSG00000147381 | YPSLREAA | 2398 | HLA-B*54:01 |
| 5058 | MAGEA4 | ENSG00000147381 | YPSLREAA | 2398 | HLA-B*55:01 |
| 5059 | MAGEA4 | ENSG00000147381 | YPSLREAA | 2398 | HLA-B*56:01 |
| 5060 | MAGEA4 | ENSG00000147381 | YRAKELVTK | 2399 | HLA-B*27:02 |
| 5061 | MAGEA4 | ENSG00000147381 | YRAKELVTK | 2399 | HLA-B*27:05 |
| 5062 | MAGEA4 | ENSG00000147381 | YRAKELVTK | 2399 | HLA-C*06:02 |
| 5063 | MAGEA4 | ENSG00000147381 | YRQVPGSNPAR | 2400 | HLA-B*27:05 |
| 5064 | MAGEA4 | ENSG00000147381 | YRQVPGSNP | 2401 | HLA-B*27:05 |
| 5065 | MAGEA4 | ENSG00000147381 | YVKVLEHVVR | 2402 | HLA-A*31:01 |
| 5066 | MAGEA4 | ENSG00000147381 | YVKVLEHVVR | 2402 | HLA-A*33:01 |
| 5067 | MAGEA4 | ENSG00000147381 | YVKVLEHVV | 2403 | HLA-A*02:01 |
| 5068 | MAGEA4 | ENSG00000147381 | YVKVLEHVV | 2403 | HLA-A*02:03 |
| 5069 | MAGEA4 | ENSG00000147381 | YVKVLEHVV | 2403 | HLA-A*02:04 |
| 5070 | MAGEA4 | ENSG00000147381 | YVKVLEHVV | 2403 | HLA-A*02:07 |
| 5071 | MAGEA4 | ENSG00000147381 | YVKVLEHVV | 2403 | HLA-A*24:02 |
| 5072 | MAGEA4 | ENSG00000147381 | YVKVLEHVV | 2403 | HLA-A*30:01 |
| 5073 | MAGEA4 | ENSG00000147381 | YVKVLEHVV | 2403 | HLA-A*32:01 |
| 5074 | MAGEA4 | ENSG00000147381 | YVKVLEHVV | 2403 | HLA-A*68:02 |
| 5075 | MAGEA4 | ENSG00000147381 | YVKVLEHVV | 2403 | HLA-B*08:01 |
| 5076 | MAGEA4 | ENSG00000147381 | YVKVLEHVV | 2403 | HLA-B*13:02 |
| 5077 | MAGEA4 | ENSG00000147381 | YVKVLEHVV | 2403 | HLA-B*40:02 |
| 5078 | MAGEA4 | ENSG00000147381 | YVKVLEHVV | 2403 | HLA-B*51:01 |
| 5079 | MAGEA4 | ENSG00000147381 | YVKVLEHVV | 2403 | HLA-B*54:01 |
| 5080 | MAGEA4 | ENSG00000147381 | YVKVLEHVV | 2403 | HLA-C*02:02 |
| 5081 | MAGEA4 | ENSG00000147381 | YVKVLEHVV | 2403 | HLA-C*04:01 |
| 5082 | MAGEA4 | ENSG00000147381 | YVKVLEHVV | 2403 | HLA-C*07:01 |
| 5083 | MAGEA4 | ENSG00000147381 | YVKVLEHVV | 2403 | HLA-C*07:04 |
| 5084 | MAGEA4 | ENSG00000147381 | YVKVLEHVV | 2403 | HLA-C*12:03 |
| 5085 | MAGEA4 | ENSG00000147381 | YVKVLEHVV | 2403 | HLA-C*16:02 |
| 5086 | MAGEA4 | ENSG00000147381 | YVKVLEHV | 2404 | HLA-A*02:03 |
| 5087 | MAGEA4 | ENSG00000147381 | YVKVLEHV | 2404 | HLA-B*08:01 |
| 5088 | MAGEA4 | ENSG00000147381 | YVKVLEHV | 2404 | HLA-B*54:01 |
| 5089 | NY-ESO1 | ENSG00000184033 | AADHRQLQL | 2405 | HLA-A*01:01 |
| 5090 | NY-ESO1 | ENSG00000184033 | AADHRQLQL | 2405 | HLA-A*02:07 |
| 5091 | NY-ESO1 | ENSG00000184033 | AADHRQLQL | 2405 | HLA-B*07:02 |
| 5092 | NY-ESO1 | ENSG00000184033 | AADHRQLQL | 2405 | HLA-B*08:01 |
| 5093 | NY-ESO1 | ENSG00000184033 | AADHRQLQL | 2405 | HLA-B*38:01 |
| 5094 | NY-ESO1 | ENSG00000184033 | AADHRQLQL | 2405 | HLA-B*40:01 |
| 5095 | NY-ESO1 | ENSG00000184033 | AADHRQLQL | 2405 | HLA-B*58:01 |
| 5096 | NY-ESO1 | ENSG00000184033 | AADHRQLQL | 2405 | HLA-C*01:02 |
| 5097 | NY-ESO1 | ENSG00000184033 | AADHRQLQL | 2405 | HLA-C*03:03 |
| 5098 | NY-ESO1 | ENSG00000184033 | AADHRQLQL | 2405 | HLA-C*03:04 |
| 5099 | NY-ESO1 | ENSG00000184033 | AADHRQLQL | 2405 | HLA-C*05:01 |
| 5100 | NY-ESO1 | ENSG00000184033 | AADHRQLQL | 2405 | HLA-C*07:02 |
| 5101 | NY-ESO1 | ENSG00000184033 | AADHRQLQL | 2405 | HLA-C*16:01 |
| 5102 | NY-ESO1 | ENSG00000184033 | AADHRQLQL | 2405 | HLA-C*16:02 |
| 5103 | NY-ESO1 | ENSG00000184033 | ADGPGGPGI | 2406 | HLA-A*30:01 |
| 5104 | NY-ESO1 | ENSG00000184033 | ADGPGGPGI | 2406 | HLA-B*37:01 |
| 5105 | NY-ESO1 | ENSG00000184033 | ADGPGGPGI | 2406 | HLA-B*38:01 |
| 5106 | NY-ESO1 | ENSG00000184033 | ADGPGGPGI | 2406 | HLA-B*44:02 |
| 5107 | NY-ESO1 | ENSG00000184033 | ADGPGGPGI | 2406 | HLA-B*44:03 |
| 5108 | NY-ESO1 | ENSG00000184033 | ADGPGGPGI | 2406 | HLA-B*49:01 |
| 5109 | NY-ESO1 | ENSG00000184033 | ADHRQLQL | 2407 | HLA-A*30:01 |
| 5110 | NY-ESO1 | ENSG00000184033 | ADHRQLQL | 2407 | HLA-B*37:01 |
| 5111 | NY-ESO1 | ENSG00000184033 | ADHRQLQL | 2407 | HLA-B*40:02 |
| 5112 | NY-ESO1 | ENSG00000184033 | ADHRQLQL | 2407 | HLA-C*06:02 |
| 5113 | NY-ESO1 | ENSG00000184033 | ADHRQLQL | 2407 | HLA-C*07:04 |
| 5114 | NY-ESO1 | ENSG00000184033 | AEGRGTGGST | 2408 | HLA-B*40:01 |
| 5115 | NY-ESO1 | ENSG00000184033 | AGAARASGPGG | 2409 | HLA-C*04:01 |
| 5116 | NY-ESO1 | ENSG00000184033 | AGAARASGP | 2410 | HLA-A*32:01 |
| 5117 | NY-ESO1 | ENSG00000184033 | AGAARASGP | 2410 | HLA-C*07:04 |
| 5118 | NY-ESO1 | ENSG00000184033 | AGAARASGP | 2410 | HLA-C*16:01 |
| 5119 | NY-ESO1 | ENSG00000184033 | AGAARASGP | 2410 | HLA-C*16:02 |
| 5120 | NY-ESO1 | ENSG00000184033 | AGATGGRGP | 2411 | HLA-C*16:01 |
| 5121 | NY-ESO1 | ENSG00000184033 | AMPFATPMEA | 2412 | HLA-A*02:01 |
| 5122 | NY-ESO1 | ENSG00000184033 | AMPFATPMEA | 2412 | HLA-A*02:03 |
| 5123 | NY-ESO1 | ENSG00000184033 | AMPFATPMEA | 2412 | HLA-A*02:07 |
| 5124 | NY-ESO1 | ENSG00000184033 | AMPFATPM | 2413 | HLA-C*01:02 |
| 5125 | NY-ESO1 | ENSG00000184033 | APPLPVPGVLL | 2414 | HLA-B*07:02 |
| 5126 | NY-ESO1 | ENSG00000184033 | APPLPVPGVL | 2415 | HLA-B*07:02 |
| 5127 | NY-ESO1 | ENSG00000184033 | APPLPVPGVL | 2415 | HLA-B*56:01 |
| 5128 | NY-ESO1 | ENSG00000184033 | APPLPVPGVL | 2415 | HLA-C*07:02 |
| 5129 | NY-ESO1 | ENSG00000184033 | APPLPVPGV | 2416 | HLA-A*02:07 |
| 5130 | NY-ESO1 | ENSG00000184033 | APPLPVPGV | 2416 | HLA-B*07:02 |
| 5131 | NY-ESO1 | ENSG00000184033 | APPLPVPGV | 2416 | HLA-B*13:02 |
| 5132 | NY-ESO1 | ENSG00000184033 | APPLPVPGV | 2416 | HLA-B*37:01 |
| 5133 | NY-ESO1 | ENSG00000184033 | APPLPVPGV | 2416 | HLA-B*51:01 |
| 5134 | NY-ESO1 | ENSG00000184033 | APPLPVPGV | 2416 | HLA-B*54:01 |
| 5135 | NY-ESO1 | ENSG00000184033 | APPLPVPGV | 2416 | HLA-B*55:01 |
| 5136 | NY-ESO1 | ENSG00000184033 | APPLPVPGV | 2416 | HLA-B*56:01 |
| 5137 | NY-ESO1 | ENSG00000184033 | APPLPVPGV | 2416 | HLA-C*04:01 |
| 5138 | NY-ESO1 | ENSG00000184033 | APPLPVPGV | 2416 | HLA-C*07:02 |
| 5139 | NY-ESO1 | ENSG00000184033 | APRGPHGGAAS | 2417 | HLA-B*07:02 |
| 5140 | NY-ESO1 | ENSG00000184033 | APRGPHGGAAS | 2417 | HLA-C*07:02 |
| 5141 | NY-ESO1 | ENSG00000184033 | APRGPHGGAA | 2418 | HLA-B*07:02 |
| 5142 | NY-ESO1 | ENSG00000184033 | APRGPHGGAA | 2418 | HLA-B*54:01 |
| 5143 | NY-ESO1 | ENSG00000184033 | APRGPHGGAA | 2418 | HLA-B*55:01 |
| 5144 | NY-ESO1 | ENSG00000184033 | APRGPHGGAA | 2418 | HLA-B*56:01 |
| 5145 | NY-ESO1 | ENSG00000184033 | APRGPHGGAA | 2418 | HLA-C*07:02 |
| 5146 | NY-ESO1 | ENSG00000184033 | APRGPHGGA | 2419 | HLA-B*07:02 |
| 5147 | NY-ESO1 | ENSG00000184033 | APRGPHGGA | 2419 | HLA-B*54:01 |
| 5148 | NY-ESO1 | ENSG00000184033 | APRGPHGGA | 2419 | HLA-B*55:01 |
| 5149 | NY-ESO1 | ENSG00000184033 | APRGPHGGA | 2419 | HLA-B*56:01 |
| 5150 | NY-ESO1 | ENSG00000184033 | APRGPHGGA | 2419 | HLA-C*07:02 |
| 5151 | NY-ESO1 | ENSG00000184033 | AQDAPPLPVPG | 2420 | HLA-B*27:05 |
| 5152 | NY-ESO1 | ENSG00000184033 | AQDAPPLPV | 2421 | HLA-A*01:01 |
| 5153 | NY-ESO1 | ENSG00000184033 | AQDAPPLPV | 2421 | HLA-A*02:01 |
| 5154 | NY-ESO1 | ENSG00000184033 | AQDAPPLPV | 2421 | HLA-A*02:03 |
| 5155 | NY-ESO1 | ENSG00000184033 | AQDAPPLPV | 2421 | HLA-A*02:07 |
| 5156 | NY-ESO1 | ENSG00000184033 | AQDAPPLPV | 2421 | HLA-A*03:01 |
| 5157 | NY-ESO1 | ENSG00000184033 | AQDAPPLPV | 2421 | HLA-A*11:01 |
| 5158 | NY-ESO1 | ENSG00000184033 | AQDAPPLPV | 2421 | HLA-A*30:01 |
| 5159 | NY-ESO1 | ENSG00000184033 | AQDAPPLPV | 2421 | HLA-B*13:02 |
| 5160 | NY-ESO1 | ENSG00000184033 | AQDAPPLPV | 2421 | HLA-B*27:05 |
| 5161 | NY-ESO1 | ENSG00000184033 | AQDAPPLPV | 2421 | HLA-B*37:01 |
| 5162 | NY-ESO1 | ENSG00000184033 | AQDAPPLPV | 2421 | HLA-B*38:01 |
| 5163 | NY-ESO1 | ENSG00000184033 | AQDAPPLPV | 2421 | HLA-B*39:01 |
| 5164 | NY-ESO1 | ENSG00000184033 | AQDAPPLPV | 2421 | HLA-B*49:01 |
| 5165 | NY-ESO1 | ENSG00000184033 | AQDAPPLPV | 2421 | HLA-B*55:01 |
| 5166 | NY-ESO1 | ENSG00000184033 | AQDAPPLPV | 2421 | HLA-C*02:02 |
| 5167 | NY-ESO1 | ENSG00000184033 | AQDAPPLPV | 2421 | HLA-C*03:03 |
| 5168 | NY-ESO1 | ENSG00000184033 | AQDAPPLPV | 2421 | HLA-C*03:04 |
| 5169 | NY-ESO1 | ENSG00000184033 | AQDAPPLPV | 2421 | HLA-C*05:01 |
| 5170 | NY-ESO1 | ENSG00000184033 | AQDAPPLPV | 2421 | HLA-C*06:02 |
| 5171 | NY-ESO1 | ENSG00000184033 | AQPPSGQRR | 2422 | HLA-A*31:01 |
| 5172 | NY-ESO1 | ENSG00000184033 | AQPPSGQRR | 2422 | HLA-A*32:01 |
| 5173 | NY-ESO1 | ENSG00000184033 | AQPPSGQRR | 2422 | HLA-B*27:05 |
| 5174 | NY-ESO1 | ENSG00000184033 | AQPPSGQRR | 2422 | HLA-C*06:02 |
| 5175 | NY-ESO1 | ENSG00000184033 | AQPPSGQRR | 2422 | HLA-C*07:02 |
| 5176 | NY-ESO1 | ENSG00000184033 | ARASGPGGGAP | 2423 | HLA-B*27:05 |
| 5177 | NY-ESO1 | ENSG00000184033 | ARASGPGGGAP | 2423 | HLA-B*39:01 |
| 5178 | NY-ESO1 | ENSG00000184033 | ARASGPGGGA | 2424 | HLA-B*27:05 |
| 5179 | NY-ESO1 | ENSG00000184033 | ARGPESRLLEF | 2425 | HLA-C*16:04 |
| 5180 | NY-ESO1 | ENSG00000184033 | ARGPESRLL | 2426 | HLA-B*07:02 |
| 5181 | NY-ESO1 | ENSG00000184033 | ARGPESRLL | 2426 | HLA-B*27:05 |
| 5182 | NY-ESO1 | ENSG00000184033 | ARGPESRLL | 2426 | HLA-C*06:02 |
| 5183 | NY-ESO1 | ENSG00000184033 | ARGPESRLL | 2426 | HLA-C*07:01 |
| 5184 | NY-ESO1 | ENSG00000184033 | ARGPESRLL | 2426 | HLA-C*07:02 |
| 5185 | NY-ESO1 | ENSG00000184033 | ASGPGGGAPR | 2427 | HLA-A*01:01 |
| 5186 | NY-ESO1 | ENSG00000184033 | ASGPGGGAPR | 2427 | HLA-A*03:02 |
| 5187 | NY-ESO1 | ENSG00000184033 | ASGPGGGAPR | 2427 | HLA-A*11:01 |
| 5188 | NY-ESO1 | ENSG00000184033 | ASGPGGGAPR | 2427 | HLA-A*30:02 |
| 5189 | NY-ESO1 | ENSG00000184033 | ASGPGGGAPR | 2427 | HLA-A*31:01 |
| 5190 | NY-ESO1 | ENSG00000184033 | ASGPGGGAPR | 2427 | HLA-A*33:01 |
| 5191 | NY-ESO1 | ENSG00000184033 | ASGPGGGAPR | 2427 | HLA-A*33:03 |
| 5192 | NY-ESO1 | ENSG00000184033 | ASGPGGGAPR | 2427 | HLA-A*68:01 |
| 5193 | NY-ESO1 | ENSG00000184033 | ASGPGGGAPR | 2427 | HLA-B*27:05 |
| 5194 | NY-ESO1 | ENSG00000184033 | ASGPGGGAPR | 2427 | HLA-C*01:02 |
| 5195 | NY-ESO1 | ENSG00000184033 | ASGPGGGAPR | 2427 | HLA-C*07:04 |
| 5196 | NY-ESO1 | ENSG00000184033 | ASGPGGGAPR | 2427 | HLA-C*07:06 |
| 5197 | NY-ESO1 | ENSG00000184033 | ATPMEAELARR | 2428 | HLA-A*11:01 |
| 5198 | NY-ESO1 | ENSG00000184033 | ATPMEAELAR | 2429 | HLA-C*07:06 |
| 5199 | NY-ESO1 | ENSG00000184033 | ATPMEAEL | 2430 | HLA-C*01:02 |
| 5200 | NY-ESO1 | ENSG00000184033 | DADGPGGPGI | 2431 | HLA-B*38:01 |
| 5201 | NY-ESO1 | ENSG00000184033 | DADGPGGPGI | 2431 | HLA-B*51:01 |
| 5202 | NY-ESO1 | ENSG00000184033 | DADGPGGPGI | 2431 | HLA-C*05:01 |
| 5203 | NY-ESO1 | ENSG00000184033 | DAPPLPVPGV | 2432 | HLA-A*26:01 |
| 5204 | NY-ESO1 | ENSG00000184033 | DAPPLPVPGV | 2432 | HLA-B*51:01 |
| 5205 | NY-ESO1 | ENSG00000184033 | DAPPLPVP | 2433 | HLA-B*51:01 |
| 5206 | NY-ESO1 | ENSG00000184033 | DGPGGPGI | 2434 | HLA-B*51:01 |
| 5207 | NY-ESO1 | ENSG00000184033 | DHRQLQLSI | 2435 | HLA-B*51:01 |
| 5208 | NY-ESO1 | ENSG00000184033 | EAELARRSL | 2436 | HLA-B*07:02 |
| 5209 | NY-ESO1 | ENSG00000184033 | EAELARRSL | 2436 | HLA-B*08:01 |
| 5210 | NY-ESO1 | ENSG00000184033 | EAELARRSL | 2436 | HLA-C*01:02 |
| 5211 | NY-ESO1 | ENSG00000184033 | EAELARRSL | 2436 | HLA-C*03:03 |
| 5212 | NY-ESO1 | ENSG00000184033 | EAELARRSL | 2436 | HLA-C*03:04 |
| 5213 | NY-ESO1 | ENSG00000184033 | EAELARRSL | 2436 | HLA-C*07:02 |
| 5214 | NY-ESO1 | ENSG00000184033 | EAELARRSL | 2436 | HLA-C*16:01 |
| 5215 | NY-ESO1 | ENSG00000184033 | EFTVSGNIL | 2437 | HLA-C*14:02 |
| 5216 | NY-ESO1 | ENSG00000184033 | EFYLAMPF | 2438 | HLA-C*07:01 |
| 5217 | NY-ESO1 | ENSG00000184033 | FATPMEAEL | 2439 | HLA-A*02:01 |
| 5218 | NY-ESO1 | ENSG00000184033 | FATPMEAEL | 2439 | HLA-A*23:01 |
| 5219 | NY-ESO1 | ENSG00000184033 | FATPMEAEL | 2439 | HLA-A*30:01 |
| 5220 | NY-ESO1 | ENSG00000184033 | FATPMEAEL | 2439 | HLA-A*32:01 |
| 5221 | NY-ESO1 | ENSG00000184033 | FATPMEAEL | 2439 | HLA-A*68:02 |
| 5222 | NY-ESO1 | ENSG00000184033 | FATPMEAEL | 2439 | HLA-B*13:02 |
| 5223 | NY-ESO1 | ENSG00000184033 | FATPMEAEL | 2439 | HLA-B*15:03 |
| 5224 | NY-ESO1 | ENSG00000184033 | FATPMEAEL | 2439 | HLA-B*27:05 |
| 5225 | NY-ESO1 | ENSG00000184033 | FATPMEAEL | 2439 | HLA-B*35:01 |
| 5226 | NY-ESO1 | ENSG00000184033 | FATPMEAEL | 2439 | HLA-B*35:03 |
| 5227 | NY-ESO1 | ENSG00000184033 | FATPMEAEL | 2439 | HLA-B*38:01 |
| 5228 | NY-ESO1 | ENSG00000184033 | FATPMEAEL | 2439 | HLA-B*39:01 |
| 5229 | NY-ESO1 | ENSG00000184033 | FATPMEAEL | 2439 | HLA-B*40:01 |
| 5230 | NY-ESO1 | ENSG00000184033 | FATPMEAEL | 2439 | HLA-B*46:01 |
| 5231 | NY-ESO1 | ENSG00000184033 | FATPMEAEL | 2439 | HLA-B*51:01 |
| 5232 | NY-ESO1 | ENSG00000184033 | FATPMEAEL | 2439 | HLA-B*54:01 |
| 5233 | NY-ESO1 | ENSG00000184033 | FATPMEAEL | 2439 | HLA-B*55:01 |
| 5234 | NY-ESO1 | ENSG00000184033 | FATPMEAEL | 2439 | HLA-B*58:01 |
| 5235 | NY-ESO1 | ENSG00000184033 | FATPMEAEL | 2439 | HLA-C*01:02 |
| 5236 | NY-ESO1 | ENSG00000184033 | FATPMEAEL | 2439 | HLA-C*02:02 |
| 5237 | NY-ESO1 | ENSG00000184033 | FATPMEAEL | 2439 | HLA-C*03:03 |
| 5238 | NY-ESO1 | ENSG00000184033 | FATPMEAEL | 2439 | HLA-C*03:04 |
| 5239 | NY-ESO1 | ENSG00000184033 | FATPMEAEL | 2439 | HLA-C*04:01 |
| 5240 | NY-ESO1 | ENSG00000184033 | FATPMEAEL | 2439 | HLA-C*05:01 |
| 5241 | NY-ESO1 | ENSG00000184033 | FATPMEAEL | 2439 | HLA-C*07:04 |
| 5242 | NY-ESO1 | ENSG00000184033 | FATPMEAEL | 2439 | HLA-C*07:06 |
| 5243 | NY-ESO1 | ENSG00000184033 | FATPMEAEL | 2439 | HLA-C*12:03 |
| 5244 | NY-ESO1 | ENSG00000184033 | FATPMEAEL | 2439 | HLA-C*14:02 |
| 5245 | NY-ESO1 | ENSG00000184033 | FATPMEAEL | 2439 | HLA-C*16:01 |
| 5246 | NY-ESO1 | ENSG00000184033 | FATPMEAEL | 2439 | HLA-C*16:02 |
| 5247 | NY-ESO1 | ENSG00000184033 | FATPMEAEL | 2439 | HLA-C*16:04 |
| 5248 | NY-ESO1 | ENSG00000184033 | FLAQPPSGQRR | 2440 | HLA-A*01:01 |
| 5249 | NY-ESO1 | ENSG00000184033 | FLAQPPSGQRR | 2440 | HLA-A*02:03 |
| 5250 | NY-ESO1 | ENSG00000184033 | FLAQPPSGQRR | 2440 | HLA-A*02:04 |
| 5251 | NY-ESO1 | ENSG00000184033 | FLAQPPSGQRR | 2440 | HLA-A*31:01 |
| 5252 | NY-ESO1 | ENSG00000184033 | FLAQPPSGQRR | 2440 | HLA-A*33:01 |
| 5253 | NY-ESO1 | ENSG00000184033 | FLAQPPSGQRR | 2440 | HLA-A*33:03 |
| 5254 | NY-ESO1 | ENSG00000184033 | FLAQPPSGQRR | 2440 | HLA-A*68:01 |
| 5255 | NY-ESO1 | ENSG00000184033 | FLAQPPSGQRR | 2440 | HLA-A*68:02 |
| 5256 | NY-ESO1 | ENSG00000184033 | FLAQPPSGQRR | 2440 | HLA-B*27:05 |
| 5257 | NY-ESO1 | ENSG00000184033 | FLAQPPSGQRR | 2440 | HLA-C*07:02 |
| 5258 | NY-ESO1 | ENSG00000184033 | FLAQPPSGQR | 2441 | HLA-A*68:01 |
| 5259 | NY-ESO1 | ENSG00000184033 | FLAQPPSGQ | 2442 | HLA-A*02:03 |
| 5260 | NY-ESO1 | ENSG00000184033 | FLAQPPSGQ | 2442 | HLA-A*32:01 |
| 5261 | NY-ESO1 | ENSG00000184033 | FLPVFLAQP | 2443 | HLA-A*02:07 |
| 5262 | NY-ESO1 | ENSG00000184033 | FTVSGNILTIR | 2444 | HLA-A*33:03 |
| 5263 | NY-ESO1 | ENSG00000184033 | FTVSGNILTIR | 2444 | HLA-A*68:01 |
| 5264 | NY-ESO1 | ENSG00000184033 | FTVSGNILTIR | 2444 | HLA-A*68:02 |
| 5265 | NY-ESO1 | ENSG00000184033 | FTVSGNILTI | 2445 | HLA-A*02:03 |
| 5266 | NY-ESO1 | ENSG00000184033 | FTVSGNILTI | 2445 | HLA-A*23:01 |
| 5267 | NY-ESO1 | ENSG00000184033 | FTVSGNILTI | 2445 | HLA-A*25:01 |
| 5268 | NY-ESO1 | ENSG00000184033 | FTVSGNILTI | 2445 | HLA-A*26:01 |
| 5269 | NY-ESO1 | ENSG00000184033 | FTVSGNILTI | 2445 | HLA-A*68:02 |
| 5270 | NY-ESO1 | ENSG00000184033 | FTVSGNILTI | 2445 | HLA-C*02:02 |
| 5271 | NY-ESO1 | ENSG00000184033 | FTVSGNIL | 2446 | HLA-B*39:01 |
| 5272 | NY-ESO1 | ENSG00000184033 | FTVSGNIL | 2446 | HLA-B*46:01 |
| 5273 | NY-ESO1 | ENSG00000184033 | FTVSGNIL | 2446 | HLA-C*02:02 |
| 5274 | NY-ESO1 | ENSG00000184033 | FTVSGNIL | 2446 | HLA-C*03:03 |
| 5275 | NY-ESO1 | ENSG00000184033 | FTVSGNIL | 2446 | HLA-C*03:04 |
| 5276 | NY-ESO1 | ENSG00000184033 | FTVSGNIL | 2446 | HLA-C*14:02 |
| 5277 | NY-ESO1 | ENSG00000184033 | GARGPESRL | 2447 | HLA-B*07:02 |
| 5278 | NY-ESO1 | ENSG00000184033 | GARGPESRL | 2447 | HLA-C*07:02 |
| 5279 | NY-ESO1 | ENSG00000184033 | GATGGRGP | 2448 | HLA-C*16:02 |
| 5280 | NY-ESO1 | ENSG00000184033 | GEAGATGGRGP | 2449 | HLA-C*06:02 |
| 5281 | NY-ESO1 | ENSG00000184033 | GEAGATGGRGP | 2449 | HLA-C*16:04 |
| 5282 | NY-ESO1 | ENSG00000184033 | GPESRLLEF | 2450 | HLA-B*07:02 |
| 5283 | NY-ESO1 | ENSG00000184033 | GPESRLLEF | 2450 | HLA-B*08:01 |
| 5284 | NY-ESO1 | ENSG00000184033 | GPESRLLEF | 2450 | HLA-B*35:01 |
| 5285 | NY-ESO1 | ENSG00000184033 | GPESRLLEF | 2450 | HLA-B*55:01 |
| 5286 | NY-ESO1 | ENSG00000184033 | GPESRLLEF | 2450 | HLA-C*07:02 |
| 5287 | NY-ESO1 | ENSG00000184033 | GPGGGAPRGP | 2451 | HLA-C*07:02 |
| 5288 | NY-ESO1 | ENSG00000184033 | GPHGGAASGL | 2452 | HLA-B*07:02 |
| 5289 | NY-ESO1 | ENSG00000184033 | GPHGGAASGL | 2452 | HLA-C*07:02 |
| 5290 | NY-ESO1 | ENSG00000184033 | GPRGAGAARAS | 2453 | HLA-B*07:02 |
| 5291 | NY-ESO1 | ENSG00000184033 | GPRGAGAARA | 2454 | HLA-B*07:02 |
| 5292 | NY-ESO1 | ENSG00000184033 | GPRGAGAARA | 2454 | HLA-B*56:01 |
| 5293 | NY-ESO1 | ENSG00000184033 | GPRGAGAARA | 2454 | HLA-C*07:02 |
| 5294 | NY-ESO1 | ENSG00000184033 | GPRGAGAAR | 2455 | HLA-A*33:03 |
| 5295 | NY-ESO1 | ENSG00000184033 | GPRGAGAAR | 2455 | HLA-B*07:02 |
| 5296 | NY-ESO1 | ENSG00000184033 | GPRGAGAAR | 2455 | HLA-C*07:02 |
| 5297 | NY-ESO1 | ENSG00000184033 | GRGPRGAGAAR | 2456 | HLA-B*27:05 |
| 5298 | NY-ESO1 | ENSG00000184033 | GVLLKEFTV | 2457 | HLA-A*02:01 |
| 5299 | NY-ESO1 | ENSG00000184033 | GVLLKEFTV | 2457 | HLA-A*02:04 |
| 5300 | NY-ESO1 | ENSG00000184033 | GVLLKEFTV | 2457 | HLA-B*13:02 |
| 5301 | NY-ESO1 | ENSG00000184033 | HGGAASGL | 2458 | HLA-C*07:04 |
| 5302 | NY-ESO1 | ENSG00000184033 | ILTIRLTAA | 2459 | HLA-A*02:01 |
| 5303 | NY-ESO1 | ENSG00000184033 | ILTIRLTAA | 2459 | HLA-A*02:03 |
| 5304 | NY-ESO1 | ENSG00000184033 | ILTIRLTAA | 2459 | HLA-A*02:04 |
| 5305 | NY-ESO1 | ENSG00000184033 | ILTIRLTAA | 2459 | HLA-B*08:01 |
| 5306 | NY-ESO1 | ENSG00000184033 | ILTIRLTAA | 2459 | HLA-B*55:01 |
| 5307 | NY-ESO1 | ENSG00000184033 | IPDGPGGNA | 2460 | HLA-B*07:02 |
| 5308 | NY-ESO1 | ENSG00000184033 | IPDGPGGNA | 2460 | HLA-B*55:01 |
| 5309 | NY-ESO1 | ENSG00000184033 | IPDGPGGNA | 2460 | HLA-B*56:01 |
| 5310 | NY-ESO1 | ENSG00000184033 | IPDGPGGNA | 2460 | HLA-C*05:01 |
| 5311 | NY-ESO1 | ENSG00000184033 | KEFTVSGNIL | 2461 | HLA-A*30:01 |
| 5312 | NY-ESO1 | ENSG00000184033 | KEFTVSGNIL | 2461 | HLA-B*27:05 |
| 5313 | NY-ESO1 | ENSG00000184033 | KEFTVSGNIL | 2461 | HLA-B*37:01 |
| 5314 | NY-ESO1 | ENSG00000184033 | KEFTVSGNIL | 2461 | HLA-B*40:01 |
| 5315 | NY-ESO1 | ENSG00000184033 | KEFTVSGNIL | 2461 | HLA-B*40:02 |
| 5316 | NY-ESO1 | ENSG00000184033 | KEFTVSGNIL | 2461 | HLA-B*44:02 |
| 5317 | NY-ESO1 | ENSG00000184033 | KEFTVSGNIL | 2461 | HLA-B*44:03 |
| 5318 | NY-ESO1 | ENSG00000184033 | KEFTVSGNIL | 2461 | HLA-B*49:01 |
| 5319 | NY-ESO1 | ENSG00000184033 | KEFTVSGNIL | 2461 | HLA-C*12:03 |
| 5320 | NY-ESO1 | ENSG00000184033 | KEFTVSGNIL | 2461 | HLA-C*16:04 |
| 5321 | NY-ESO1 | ENSG00000184033 | KEFTVSGNI | 2462 | HLA-A*30:01 |
| 5322 | NY-ESO1 | ENSG00000184033 | KEFTVSGNI | 2462 | HLA-B*13:02 |
| 5323 | NY-ESO1 | ENSG00000184033 | KEFTVSGNI | 2462 | HLA-B*37:01 |
| 5324 | NY-ESO1 | ENSG00000184033 | KEFTVSGNI | 2462 | HLA-B*40:01 |
| 5325 | NY-ESO1 | ENSG00000184033 | KEFTVSGNI | 2462 | HLA-B*40:02 |
| 5326 | NY-ESO1 | ENSG00000184033 | KEFTVSGNI | 2462 | HLA-B*44:02 |
| 5327 | NY-ESO1 | ENSG00000184033 | KEFTVSGNI | 2462 | HLA-B*44:03 |
| 5328 | NY-ESO1 | ENSG00000184033 | KEFTVSGNI | 2462 | HLA-B*49:01 |
| 5329 | NY-ESO1 | ENSG00000184033 | KEFTVSGNI | 2462 | HLA-C*16:04 |
| 5330 | NY-ESO1 | ENSG00000184033 | LAMPFATPMEA | 2463 | HLA-B*54:01 |
| 5331 | NY-ESO1 | ENSG00000184033 | LAMPFATPM | 2464 | HLA-A*11:01 |
| 5332 | NY-ESO1 | ENSG00000184033 | LAMPFATPM | 2464 | HLA-A*23:01 |
| 5333 | NY-ESO1 | ENSG00000184033 | LAMPFATPM | 2464 | HLA-A*24:02 |
| 5334 | NY-ESO1 | ENSG00000184033 | LAMPFATPM | 2464 | HLA-A*26:01 |
| 5335 | NY-ESO1 | ENSG00000184033 | LAMPFATPM | 2464 | HLA-B*07:02 |
| 5336 | NY-ESO1 | ENSG00000184033 | LAMPFATPM | 2464 | HLA-B*08:01 |
| 5337 | NY-ESO1 | ENSG00000184033 | LAMPFATPM | 2464 | HLA-B*15:01 |
| 5338 | NY-ESO1 | ENSG00000184033 | LAMPFATPM | 2464 | HLA-B*15:03 |
| 5339 | NY-ESO1 | ENSG00000184033 | LAMPFATPM | 2464 | HLA-B*18:01 |
| 5340 | NY-ESO1 | ENSG00000184033 | LAMPFATPM | 2464 | HLA-B*35:01 |
| 5341 | NY-ESO1 | ENSG00000184033 | LAMPFATPM | 2464 | HLA-B*35:03 |
| 5342 | NY-ESO1 | ENSG00000184033 | LAMPFATPM | 2464 | HLA-B*37:01 |
| 5343 | NY-ESO1 | ENSG00000184033 | LAMPFATPM | 2464 | HLA-B*39:01 |
| 5344 | NY-ESO1 | ENSG00000184033 | LAMPFATPM | 2464 | HLA-B*40:02 |
| 5345 | NY-ESO1 | ENSG00000184033 | LAMPFATPM | 2464 | HLA-B*46:01 |
| 5346 | NY-ESO1 | ENSG00000184033 | LAMPFATPM | 2464 | HLA-B*51:01 |
| 5347 | NY-ESO1 | ENSG00000184033 | LAMPFATPM | 2464 | HLA-B*54:01 |
| 5348 | NY-ESO1 | ENSG00000184033 | LAMPFATPM | 2464 | HLA-B*56:01 |
| 5349 | NY-ESO1 | ENSG00000184033 | LAMPFATPM | 2464 | HLA-B*57:01 |
| 5350 | NY-ESO1 | ENSG00000184033 | LAMPFATPM | 2464 | HLA-B*58:01 |
| 5351 | NY-ESO1 | ENSG00000184033 | LAMPFATPM | 2464 | HLA-C*01:02 |
| 5352 | NY-ESO1 | ENSG00000184033 | LAMPFATPM | 2464 | HLA-C*02:02 |
| 5353 | NY-ESO1 | ENSG00000184033 | LAMPFATPM | 2464 | HLA-C*03:03 |
| 5354 | NY-ESO1 | ENSG00000184033 | LAMPFATPM | 2464 | HLA-C*03:04 |
| 5355 | NY-ESO1 | ENSG00000184033 | LAMPFATPM | 2464 | HLA-C*04:01 |
| 5356 | NY-ESO1 | ENSG00000184033 | LAMPFATPM | 2464 | HLA-C*05:01 |
| 5357 | NY-ESO1 | ENSG00000184033 | LAMPFATPM | 2464 | HLA-C*06:02 |
| 5358 | NY-ESO1 | ENSG00000184033 | LAMPFATPM | 2464 | HLA-C*07:01 |
| 5359 | NY-ESO1 | ENSG00000184033 | LAMPFATPM | 2464 | HLA-C*07:04 |
| 5360 | NY-ESO1 | ENSG00000184033 | LAMPFATPM | 2464 | HLA-C*07:06 |
| 5361 | NY-ESO1 | ENSG00000184033 | LAMPFATPM | 2464 | HLA-C*12:03 |
| 5362 | NY-ESO1 | ENSG00000184033 | LAMPFATPM | 2464 | HLA-C*14:02 |
| 5363 | NY-ESO1 | ENSG00000184033 | LAMPFATPM | 2464 | HLA-C*16:01 |
| 5364 | NY-ESO1 | ENSG00000184033 | LAMPFATPM | 2464 | HLA-C*16:02 |
| 5365 | NY-ESO1 | ENSG00000184033 | LAMPFATPM | 2464 | HLA-C*16:04 |
| 5366 | NY-ESO1 | ENSG00000184033 | LAQDAPPLPV | 2465 | HLA-B*56:01 |
| 5367 | NY-ESO1 | ENSG00000184033 | LAQDAPPLPV | 2465 | HLA-C*03:03 |
| 5368 | NY-ESO1 | ENSG00000184033 | LAQDAPPLPV | 2465 | HLA-C*03:04 |
| 5369 | NY-ESO1 | ENSG00000184033 | LAQDAPPLPV | 2465 | HLA-C*16:04 |
| 5370 | NY-ESO1 | ENSG00000184033 | LAQDAPPL | 2466 | HLA-C*03:03 |
| 5371 | NY-ESO1 | ENSG00000184033 | LAQDAPPL | 2466 | HLA-C*03:04 |
| 5372 | NY-ESO1 | ENSG00000184033 | LAQPPSGQRR | 2467 | HLA-A*03:02 |
| 5373 | NY-ESO1 | ENSG00000184033 | LAQPPSGQRR | 2467 | HLA-A*11:01 |
| 5374 | NY-ESO1 | ENSG00000184033 | LAQPPSGQRR | 2467 | HLA-A*31:01 |
| 5375 | NY-ESO1 | ENSG00000184033 | LAQPPSGQRR | 2467 | HLA-A*33:01 |
| 5376 | NY-ESO1 | ENSG00000184033 | LAQPPSGQRR | 2467 | HLA-A*33:03 |
| 5377 | NY-ESO1 | ENSG00000184033 | LAQPPSGQRR | 2467 | HLA-A*68:01 |
| 5378 | NY-ESO1 | ENSG00000184033 | LAQPPSGQRR | 2467 | HLA-B*27:05 |
| 5379 | NY-ESO1 | ENSG00000184033 | LAQPPSGQRR | 2467 | HLA-B*57:01 |
| 5380 | NY-ESO1 | ENSG00000184033 | LAQPPSGQRR | 2467 | HLA-B*58:01 |
| 5381 | NY-ESO1 | ENSG00000184033 | LAQPPSGQRR | 2467 | HLA-C*06:02 |
| 5382 | NY-ESO1 | ENSG00000184033 | LAQPPSGQRR | 2467 | HLA-C*07:01 |
| 5383 | NY-ESO1 | ENSG00000184033 | LAQPPSGQRR | 2467 | HLA-C*07:02 |
| 5384 | NY-ESO1 | ENSG00000184033 | LAQPPSGQRR | 2467 | HLA-C*07:06 |
| 5385 | NY-ESO1 | ENSG00000184033 | LAQPPSGQRR | 2467 | HLA-C*16:02 |
| 5386 | NY-ESO1 | ENSG00000184033 | LAQPPSGQR | 2468 | HLA-A*03:02 |
| 5387 | NY-ESO1 | ENSG00000184033 | LAQPPSGQR | 2468 | HLA-A*11:01 |
| 5388 | NY-ESO1 | ENSG00000184033 | LAQPPSGQR | 2468 | HLA-A*31:01 |
| 5389 | NY-ESO1 | ENSG00000184033 | LAQPPSGQR | 2468 | HLA-A*33:01 |
| 5390 | NY-ESO1 | ENSG00000184033 | LAQPPSGQR | 2468 | HLA-A*33:03 |
| 5391 | NY-ESO1 | ENSG00000184033 | LAQPPSGQR | 2468 | HLA-A*68:01 |
| 5392 | NY-ESO1 | ENSG00000184033 | LAQPPSGQR | 2468 | HLA-B*27:05 |
| 5393 | NY-ESO1 | ENSG00000184033 | LAQPPSGQR | 2468 | HLA-C*07:06 |
| 5394 | NY-ESO1 | ENSG00000184033 | LAQPPSGQR | 2468 | HLA-C*16:02 |
| 5395 | NY-ESO1 | ENSG00000184033 | LPVFLAQPPSG | 2469 | HLA-B*54:01 |
| 5396 | NY-ESO1 | ENSG00000184033 | LPVFLAQPPS | 2470 | HLA-B*54:01 |
| 5397 | NY-ESO1 | ENSG00000184033 | LPVFLAQPP | 2471 | HLA-B*54:01 |
| 5398 | NY-ESO1 | ENSG00000184033 | LPVPGVLLKEF | 2472 | HLA-B*35:01 |
| 5399 | NY-ESO1 | ENSG00000184033 | LPVPGVLLK | 2473 | HLA-B*51:01 |
| 5400 | NY-ESO1 | ENSG00000184033 | LPVPGVLL | 2474 | HLA-B*35:01 |
| 5401 | NY-ESO1 | ENSG00000184033 | LPVPGVLL | 2474 | HLA-B*35:03 |
| 5402 | NY-ESO1 | ENSG00000184033 | LPVPGVLL | 2474 | HLA-B*51:01 |
| 5403 | NY-ESO1 | ENSG00000184033 | LPVPGVLL | 2474 | HLA-B*56:01 |
| 5404 | NY-ESO1 | ENSG00000184033 | LQLSISSCL | 2475 | HLA-B*27:05 |
| 5405 | NY-ESO1 | ENSG00000184033 | LTAADHRQL | 2476 | HLA-C*03:04 |
| 5406 | NY-ESO1 | ENSG00000184033 | LTAADHRQL | 2476 | HLA-C*06:02 |
| 5407 | NY-ESO1 | ENSG00000184033 | LTAADHRQL | 2476 | HLA-C*12:03 |
| 5408 | NY-ESO1 | ENSG00000184033 | LTAADHRQL | 2476 | HLA-C*16:01 |
| 5409 | NY-ESO1 | ENSG00000184033 | LTAADHRQL | 2476 | HLA-C*16:02 |
| 5410 | NY-ESO1 | ENSG00000184033 | MEAELARRSL | 2477 | HLA-A*30:01 |
| 5411 | NY-ESO1 | ENSG00000184033 | MEAELARRSL | 2477 | HLA-B*40:02 |
| 5412 | NY-ESO1 | ENSG00000184033 | MEAELARRSL | 2477 | HLA-B*44:02 |
| 5413 | NY-ESO1 | ENSG00000184033 | MEAELARRSL | 2477 | HLA-B*44:03 |
| 5414 | NY-ESO1 | ENSG00000184033 | MPFATPMEAEL | 2478 | HLA-A*68:02 |
| 5415 | NY-ESO1 | ENSG00000184033 | MPFATPMEAEL | 2478 | HLA-B*07:02 |
| 5416 | NY-ESO1 | ENSG00000184033 | MPFATPMEAEL | 2478 | HLA-B*35:01 |
| 5417 | NY-ESO1 | ENSG00000184033 | MPFATPMEAEL | 2478 | HLA-B*35:03 |
| 5418 | NY-ESO1 | ENSG00000184033 | MPFATPMEAEL | 2478 | HLA-B*51:01 |
| 5419 | NY-ESO1 | ENSG00000184033 | MPFATPMEAEL | 2478 | HLA-B*54:01 |
| 5420 | NY-ESO1 | ENSG00000184033 | MPFATPMEAEL | 2478 | HLA-B*55:01 |
| 5421 | NY-ESO1 | ENSG00000184033 | MPFATPMEAEL | 2478 | HLA-B*56:01 |
| 5422 | NY-ESO1 | ENSG00000184033 | MPFATPMEAEL | 2478 | HLA-C*03:03 |
| 5423 | NY-ESO1 | ENSG00000184033 | MPFATPMEAEL | 2478 | HLA-C*04:01 |
| 5424 | NY-ESO1 | ENSG00000184033 | MPFATPMEAEL | 2478 | HLA-C*07:01 |
| 5425 | NY-ESO1 | ENSG00000184033 | MPFATPMEAEL | 2478 | HLA-C*07:06 |
| 5426 | NY-ESO1 | ENSG00000184033 | MPFATPMEA | 2479 | HLA-A*02:01 |
| 5427 | NY-ESO1 | ENSG00000184033 | MPFATPMEA | 2479 | HLA-A*02:03 |
| 5428 | NY-ESO1 | ENSG00000184033 | MPFATPMEA | 2479 | HLA-B*07:02 |
| 5429 | NY-ESO1 | ENSG00000184033 | MPFATPMEA | 2479 | HLA-B*08:01 |
| 5430 | NY-ESO1 | ENSG00000184033 | MPFATPMEA | 2479 | HLA-B*35:01 |
| 5431 | NY-ESO1 | ENSG00000184033 | MPFATPMEA | 2479 | HLA-B*35:03 |
| 5432 | NY-ESO1 | ENSG00000184033 | MPFATPMEA | 2479 | HLA-B*51:01 |
| 5433 | NY-ESO1 | ENSG00000184033 | MPFATPMEA | 2479 | HLA-B*54:01 |
| 5434 | NY-ESO1 | ENSG00000184033 | MPFATPMEA | 2479 | HLA-B*55:01 |
| 5435 | NY-ESO1 | ENSG00000184033 | MPFATPMEA | 2479 | HLA-B*56:01 |
| 5436 | NY-ESO1 | ENSG00000184033 | MPFATPMEA | 2479 | HLA-C*02:02 |
| 5437 | NY-ESO1 | ENSG00000184033 | MPFATPMEA | 2479 | HLA-C*03:03 |
| 5438 | NY-ESO1 | ENSG00000184033 | MPFATPMEA | 2479 | HLA-C*04:01 |
| 5439 | NY-ESO1 | ENSG00000184033 | MPFATPMEA | 2479 | HLA-C*06:02 |
| 5440 | NY-ESO1 | ENSG00000184033 | MPFATPMEA | 2479 | HLA-C*07:02 |
| 5441 | NY-ESO1 | ENSG00000184033 | MPFATPMEA | 2479 | HLA-C*12:03 |
| 5442 | NY-ESO1 | ENSG00000184033 | MPFATPMEA | 2479 | HLA-C*14:02 |
| 5443 | NY-ESO1 | ENSG00000184033 | MPFATPMEA | 2479 | HLA-C*16:04 |
| 5444 | NY-ESO1 | ENSG00000184033 | MPFATPME | 2480 | HLA-B*54:01 |
| 5445 | NY-ESO1 | ENSG00000184033 | NILTIRLTAA | 2481 | HLA-A*02:03 |
| 5446 | NY-ESO1 | ENSG00000184033 | NILTIRLTA | 2482 | HLA-B*54:01 |
| 5447 | NY-ESO1 | ENSG00000184033 | NILTIRLTA | 2482 | HLA-C*16:01 |
| 5448 | NY-ESO1 | ENSG00000184033 | PFATPMEAEL | 2483 | HLA-C*07:02 |
| 5449 | NY-ESO1 | ENSG00000184033 | PGGGAPRGP | 2484 | HLA-C*07:02 |
| 5450 | NY-ESO1 | ENSG00000184033 | PLPVPGVLL | 2485 | HLA-A*24:02 |
| 5451 | NY-ESO1 | ENSG00000184033 | PPLPVPGVL | 2486 | HLA-B*07:02 |
| 5452 | NY-ESO1 | ENSG00000184033 | QDAPPLPVPG | 2487 | HLA-C*04:01 |
| 5453 | NY-ESO1 | ENSG00000184033 | QDAPPLPVPG | 2487 | HLA-C*06:02 |
| 5454 | NY-ESO1 | ENSG00000184033 | QDAPPLPVP | 2488 | HLA-B*27:05 |
| 5455 | NY-ESO1 | ENSG00000184033 | QDAPPLPVP | 2488 | HLA-B*40:02 |
| 5456 | NY-ESO1 | ENSG00000184033 | QDAPPLPVP | 2488 | HLA-C*04:01 |
| 5457 | NY-ESO1 | ENSG00000184033 | QDAPPLPVP | 2488 | HLA-C*06:02 |
| 5458 | NY-ESO1 | ENSG00000184033 | QDAPPLPVP | 2488 | HLA-C*07:01 |
| 5459 | NY-ESO1 | ENSG00000184033 | QDAPPLPVP | 2488 | HLA-C*07:02 |
| 5460 | NY-ESO1 | ENSG00000184033 | QDAPPLPVP | 2488 | HLA-C*07:04 |
| 5461 | NY-ESO1 | ENSG00000184033 | QDAPPLPVP | 2488 | HLA-C*12:03 |
| 5462 | NY-ESO1 | ENSG00000184033 | QDAPPLPVP | 2488 | HLA-C*16:02 |
| 5463 | NY-ESO1 | ENSG00000184033 | QDAPPLPV | 2489 | HLA-B*37:01 |
| 5464 | NY-ESO1 | ENSG00000184033 | RASGPGGGAPR | 2490 | HLA-A*31:01 |
| 5465 | NY-ESO1 | ENSG00000184033 | RASGPGGGAPR | 2490 | HLA-A*33:01 |
| 5466 | NY-ESO1 | ENSG00000184033 | RASGPGGGAPR | 2490 | HLA-A*33:03 |
| 5467 | NY-ESO1 | ENSG00000184033 | RASGPGGGAPR | 2490 | HLA-A*68:01 |
| 5468 | NY-ESO1 | ENSG00000184033 | RASGPGGGAPR | 2490 | HLA-B*27:05 |
| 5469 | NY-ESO1 | ENSG00000184033 | RASGPGGGAPR | 2490 | HLA-C*07:06 |
| 5470 | NY-ESO1 | ENSG00000184033 | RGAGAARASGP | 2491 | HLA-A*32:01 |
| 5471 | NY-ESO1 | ENSG00000184033 | RGPESRLLEF | 2492 | HLA-A*02:07 |
| 5472 | NY-ESO1 | ENSG00000184033 | RGPESRLLEF | 2492 | HLA-A*24:02 |
| 5473 | NY-ESO1 | ENSG00000184033 | RGPHGGAASGL | 2493 | HLA-C*01:02 |
| 5474 | NY-ESO1 | ENSG00000184033 | RGPRGAGAAR | 2494 | HLA-A*31:01 |
| 5475 | NY-ESO1 | ENSG00000184033 | RLLEFYLAM | 2495 | HLA-A*02:04 |
| 5476 | NY-ESO1 | ENSG00000184033 | RLLEFYLAM | 2495 | HLA-A*02:07 |
| 5477 | NY-ESO1 | ENSG00000184033 | SGNILTIRL | 2496 | HLA-A*02:04 |
| 5478 | NY-ESO1 | ENSG00000184033 | SGNILTIRL | 2496 | HLA-C*07:02 |
| 5479 | NY-ESO1 | ENSG00000184033 | SGPGGGAPRGP | 2497 | HLA-B*07:02 |
| 5480 | NY-ESO1 | ENSG00000184033 | SGPGGGAPRGP | 2497 | HLA-C*04:01 |
| 5481 | NY-ESO1 | ENSG00000184033 | SGPGGGAPRGP | 2497 | HLA-C*06:02 |
| 5482 | NY-ESO1 | ENSG00000184033 | SGPGGGAPRGP | 2497 | HLA-C*07:01 |
| 5483 | NY-ESO1 | ENSG00000184033 | SGPGGGAPRGP | 2497 | HLA-C*07:02 |
| 5484 | NY-ESO1 | ENSG00000184033 | SGPGGGAPRGP | 2497 | HLA-C*16:02 |
| 5485 | NY-ESO1 | ENSG00000184033 | SGPGGGAPR | 2498 | HLA-A*68:01 |
| 5486 | NY-ESO1 | ENSG00000184033 | SGPGGGAPR | 2498 | HLA-C*01:02 |
| 5487 | NY-ESO1 | ENSG00000184033 | SGPGGGAPR | 2498 | HLA-C*07:06 |
| 5488 | NY-ESO1 | ENSG00000184033 | SGPGGGAP | 2499 | HLA-C*01:02 |
| 5489 | NY-ESO1 | ENSG00000184033 | SISSCLQQL | 2500 | HLA-A*02:04 |
| 5490 | NY-ESO1 | ENSG00000184033 | SISSCLQQL | 2500 | HLA-A*24:02 |
| 5491 | NY-ESO1 | ENSG00000184033 | SISSCLQQL | 2500 | HLA-A*68:02 |
| 5492 | NY-ESO1 | ENSG00000184033 | SISSCLQQL | 2500 | HLA-C*07:04 |
| 5493 | NY-ESO1 | ENSG00000184033 | SLAQDAPPLPV | 2501 | HLA-A*02:01 |
| 5494 | NY-ESO1 | ENSG00000184033 | SLAQDAPPLPV | 2501 | HLA-A*02:03 |
| 5495 | NY-ESO1 | ENSG00000184033 | SLAQDAPPL | 2502 | HLA-A*02:01 |
| 5496 | NY-ESO1 | ENSG00000184033 | SLAQDAPPL | 2502 | HLA-A*02:04 |
| 5497 | NY-ESO1 | ENSG00000184033 | SLAQDAPPL | 2502 | HLA-B*35:03 |
| 5498 | NY-ESO1 | ENSG00000184033 | SLAQDAPPL | 2502 | HLA-C*01:02 |
| 5499 | NY-ESO1 | ENSG00000184033 | SLLMVVITQC | 2503 | HLA-A*02:01 |
| 5500 | NY-ESO1 | ENSG00000184033 | SLLMVVITQC | 2503 | HLA-A*02:04 |
| 5501 | NY-ESO1 | ENSG00000184033 | TAADHRQLQL | 2504 | HLA-A*30:01 |
| 5502 | NY-ESO1 | ENSG00000184033 | TAADHRQLQL | 2504 | HLA-B*07:02 |
| 5503 | NY-ESO1 | ENSG00000184033 | TAADHRQLQL | 2504 | HLA-C*07:02 |
| 5504 | NY-ESO1 | ENSG00000184033 | TAADHRQLQL | 2504 | HLA-C*16:01 |
| 5505 | NY-ESO1 | ENSG00000184033 | TAADHRQLQL | 2504 | HLA-C*16:02 |
| 5506 | NY-ESO1 | ENSG00000184033 | TAADHRQL | 2505 | HLA-B*07:02 |
| 5507 | NY-ESO1 | ENSG00000184033 | TAADHRQL | 2505 | HLA-B*08:01 |
| 5508 | NY-ESO1 | ENSG00000184033 | TAADHRQL | 2505 | HLA-B*35:03 |
| 5509 | NY-ESO1 | ENSG00000184033 | TAADHRQL | 2505 | HLA-C*03:03 |
| 5510 | NY-ESO1 | ENSG00000184033 | TAADHRQL | 2505 | HLA-C*03:04 |
| 5511 | NY-ESO1 | ENSG00000184033 | TAADHRQL | 2505 | HLA-C*06:02 |
| 5512 | NY-ESO1 | ENSG00000184033 | TAADHRQL | 2505 | HLA-C*12:03 |
| 5513 | NY-ESO1 | ENSG00000184033 | TAADHRQL | 2505 | HLA-C*16:01 |
| 5514 | NY-ESO1 | ENSG00000184033 | TAADHRQL | 2505 | HLA-C*16:02 |
| 5515 | NY-ESO1 | ENSG00000184033 | TPMEAELARR | 2506 | HLA-A*33:03 |
| 5516 | NY-ESO1 | ENSG00000184033 | TPMEAELARR | 2506 | HLA-A*68:01 |
| 5517 | NY-ESO1 | ENSG00000184033 | TPMEAELARR | 2506 | HLA-C*07:06 |
| 5518 | NY-ESO1 | ENSG00000184033 | TPMEAELAR | 2507 | HLA-A*33:03 |
| 5519 | NY-ESO1 | ENSG00000184033 | TPMEAELAR | 2507 | HLA-A*68:01 |
| 5520 | NY-ESO1 | ENSG00000184033 | TPMEAELAR | 2507 | HLA-B*35:01 |
| 5521 | NY-ESO1 | ENSG00000184033 | TPMEAELAR | 2507 | HLA-B*35:03 |
| 5522 | NY-ESO1 | ENSG00000184033 | TPMEAELAR | 2507 | HLA-B*54:01 |
| 5523 | NY-ESO1 | ENSG00000184033 | TPMEAELAR | 2507 | HLA-B*55:01 |
| 5524 | NY-ESO1 | ENSG00000184033 | TPMEAELAR | 2507 | HLA-B*56:01 |
| 5525 | NY-ESO1 | ENSG00000184033 | TPMEAELAR | 2507 | HLA-C*03:03 |
| 5526 | NY-ESO1 | ENSG00000184033 | TPMEAELAR | 2507 | HLA-C*07:06 |
| 5527 | NY-ESO1 | ENSG00000184033 | TPMEAELA | 2508 | HLA-B*56:01 |
| 5528 | NY-ESO1 | ENSG00000184033 | TVSGNILTIRL | 2509 | HLA-A*68:02 |
| 5529 | NY-ESO1 | ENSG00000184033 | TVSGNILTIR | 2510 | HLA-A*31:01 |
| 5530 | NY-ESO1 | ENSG00000184033 | TVSGNILTIR | 2510 | HLA-A*33:03 |
| 5531 | NY-ESO1 | ENSG00000184033 | TVSGNILTIR | 2510 | HLA-A*68:01 |
| 5532 | NY-ESO1 | ENSG00000184033 | TVSGNILTIR | 2510 | HLA-A*68:02 |
| 5533 | NY-ESO1 | ENSG00000184033 | TVSGNILTIR | 2510 | HLA-C*07:06 |
| 5534 | NY-ESO1 | ENSG00000184033 | TVSGNILTI | 2511 | HLA-A*02:01 |
| 5535 | NY-ESO1 | ENSG00000184033 | TVSGNILTI | 2511 | HLA-A*02:03 |
| 5536 | NY-ESO1 | ENSG00000184033 | TVSGNILTI | 2511 | HLA-A*02:04 |
| 5537 | NY-ESO1 | ENSG00000184033 | TVSGNILTI | 2511 | HLA-A*02:07 |
| 5538 | NY-ESO1 | ENSG00000184033 | TVSGNILTI | 2511 | HLA-A*03:01 |
| 5539 | NY-ESO1 | ENSG00000184033 | TVSGNILTI | 2511 | HLA-A*11:01 |
| 5540 | NY-ESO1 | ENSG00000184033 | TVSGNILTI | 2511 | HLA-A*23:01 |
| 5541 | NY-ESO1 | ENSG00000184033 | TVSGNILTI | 2511 | HLA-A*25:01 |
| 5542 | NY-ESO1 | ENSG00000184033 | TVSGNILTI | 2511 | HLA-A*26:01 |
| 5543 | NY-ESO1 | ENSG00000184033 | TVSGNILTI | 2511 | HLA-A*30:01 |
| 5544 | NY-ESO1 | ENSG00000184033 | TVSGNILTI | 2511 | HLA-A*32:01 |
| 5545 | NY-ESO1 | ENSG00000184033 | TVSGNILTI | 2511 | HLA-A*68:01 |
| 5546 | NY-ESO1 | ENSG00000184033 | TVSGNILTI | 2511 | HLA-A*68:02 |
| 5547 | NY-ESO1 | ENSG00000184033 | TVSGNILTI | 2511 | HLA-B*13:02 |
| 5548 | NY-ESO1 | ENSG00000184033 | TVSGNILTI | 2511 | HLA-B*27:05 |
| 5549 | NY-ESO1 | ENSG00000184033 | TVSGNILTI | 2511 | HLA-B*35:01 |
| 5550 | NY-ESO1 | ENSG00000184033 | TVSGNILTI | 2511 | HLA-B*35:03 |
| 5551 | NY-ESO1 | ENSG00000184033 | TVSGNILTI | 2511 | HLA-B*38:01 |
| 5552 | NY-ESO1 | ENSG00000184033 | TVSGNILTI | 2511 | HLA-B*39:01 |
| 5553 | NY-ESO1 | ENSG00000184033 | TVSGNILTI | 2511 | HLA-B*40:02 |
| 5554 | NY-ESO1 | ENSG00000184033 | TVSGNILTI | 2511 | HLA-B*49:01 |
| 5555 | NY-ESO1 | ENSG00000184033 | TVSGNILTI | 2511 | HLA-B*51:01 |
| 5556 | NY-ESO1 | ENSG00000184033 | TVSGNILTI | 2511 | HLA-B*55:01 |
| 5557 | NY-ESO1 | ENSG00000184033 | TVSGNILTI | 2511 | HLA-B*58:01 |
| 5558 | NY-ESO1 | ENSG00000184033 | TVSGNILTI | 2511 | HLA-C*02:02 |
| 5559 | NY-ESO1 | ENSG00000184033 | TVSGNILTI | 2511 | HLA-C*03:04 |
| 5560 | NY-ESO1 | ENSG00000184033 | TVSGNILTI | 2511 | HLA-C*04:01 |
| 5561 | NY-ESO1 | ENSG00000184033 | TVSGNILTI | 2511 | HLA-C*06:02 |
| 5562 | NY-ESO1 | ENSG00000184033 | TVSGNILTI | 2511 | HLA-C*07:04 |
| 5563 | NY-ESO1 | ENSG00000184033 | TVSGNILTI | 2511 | HLA-C*07:06 |
| 5564 | NY-ESO1 | ENSG00000184033 | TVSGNILTI | 2511 | HLA-C*12:03 |
| 5565 | NY-ESO1 | ENSG00000184033 | TVSGNILTI | 2511 | HLA-C*16:02 |
| 5566 | NY-ESO1 | ENSG00000184033 | VLLKEFTV | 2512 | HLA-A*02:01 |
| 5567 | NY-ESO1 | ENSG00000184033 | VLLKEFTV | 2512 | HLA-A*02:04 |
| 5568 | NY-ESO1 | ENSG00000184033 | VSGNILTIR | 2513 | HLA-A*31:01 |
| 5569 | NY-ESO1 | ENSG00000184033 | VSGNILTIR | 2513 | HLA-A*33:03 |
| 5570 | NY-ESO1 | ENSG00000184033 | VSGNILTIR | 2513 | HLA-A*68:01 |
| 5571 | NY-ESO1 | ENSG00000184033 | VSGNILTIR | 2513 | HLA-C*07:06 |
| 5572 | NY-ESO1 | ENSG00000184033 | VSGNILTI | 2514 | HLA-A*23:01 |
| 5573 | NY-ESO1 | ENSG00000184033 | VSGNILTI | 2514 | HLA-B*13:02 |
| 5574 | NY-ESO1 | ENSG00000184033 | VSGNILTI | 2514 | HLA-B*51:01 |
| 5575 | NY-ESO1 | ENSG00000184033 | VSGNILTI | 2514 | HLA-B*58:01 |
| 5576 | NY-ESO1 | ENSG00000184033 | YLAMPFATPM | 2515 | HLA-C*07:01 |
| 5577 | WT1 | ENSG00000184937 | AAGSSSSVKW | 2516 | HLA-A*25:01 |
| 5578 | WT1 | ENSG00000184937 | AAGSSSSVKW | 2516 | HLA-B*27:02 |
| 5579 | WT1 | ENSG00000184937 | AAGSSSSVKW | 2516 | HLA-B*44:02 |
| 5580 | WT1 | ENSG00000184937 | AAGSSSSVKW | 2516 | HLA-B*44:03 |
| 5581 | WT1 | ENSG00000184937 | AAGSSSSVKW | 2516 | HLA-B*58:01 |
| 5582 | WT1 | ENSG00000184937 | AAGSSSSVKW | 2516 | HLA-C*16:04 |
| 5583 | WT1 | ENSG00000184937 | AAGSSSSVK | 2517 | HLA-A*03:02 |
| 5584 | WT1 | ENSG00000184937 | AAQFPNHSFK | 2518 | HLA-A*03:01 |
| 5585 | WT1 | ENSG00000184937 | AAQFPNHSFK | 2518 | HLA-A*03:02 |
| 5586 | WT1 | ENSG00000184937 | AAQFPNHSFK | 2518 | HLA-A*11:01 |
| 5587 | WT1 | ENSG00000184937 | AAQFPNHSFK | 2518 | HLA-B*27:02 |
| 5588 | WT1 | ENSG00000184937 | AAQFPNHSF | 2519 | HLA-A*23:01 |
| 5589 | WT1 | ENSG00000184937 | AAQFPNHSF | 2519 | HLA-A*24:02 |
| 5590 | WT1 | ENSG00000184937 | AAQFPNHSF | 2519 | HLA-A*30:02 |
| 5591 | WT1 | ENSG00000184937 | AAQFPNHSF | 2519 | HLA-A*32:01 |
| 5592 | WT1 | ENSG00000184937 | AAQFPNHSF | 2519 | HLA-B*07:02 |
| 5593 | WT1 | ENSG00000184937 | AAQFPNHSF | 2519 | HLA-B*15:01 |
| 5594 | WT1 | ENSG00000184937 | AAQFPNHSF | 2519 | HLA-B*15:03 |
| 5595 | WT1 | ENSG00000184937 | AAQFPNHSF | 2519 | HLA-B*35:01 |
| 5596 | WT1 | ENSG00000184937 | AAQFPNHSF | 2519 | HLA-B*37:01 |
| 5597 | WT1 | ENSG00000184937 | AAQFPNHSF | 2519 | HLA-B*39:01 |
| 5598 | WT1 | ENSG00000184937 | AAQFPNHSF | 2519 | HLA-B*44:02 |
| 5599 | WT1 | ENSG00000184937 | AAQFPNHSF | 2519 | HLA-B*46:01 |
| 5600 | WT1 | ENSG00000184937 | AAQFPNHSF | 2519 | HLA-B*57:01 |
| 5601 | WT1 | ENSG00000184937 | AAQFPNHSF | 2519 | HLA-B*58:01 |
| 5602 | WT1 | ENSG00000184937 | AAQFPNHSF | 2519 | HLA-C*01:02 |
| 5603 | WT1 | ENSG00000184937 | AAQFPNHSF | 2519 | HLA-C*02:02 |
| 5604 | WT1 | ENSG00000184937 | AAQFPNHSF | 2519 | HLA-C*03:03 |
| 5605 | WT1 | ENSG00000184937 | AAQFPNHSF | 2519 | HLA-C*03:04 |
| 5606 | WT1 | ENSG00000184937 | AAQFPNHSF | 2519 | HLA-C*05:01 |
| 5607 | WT1 | ENSG00000184937 | AAQFPNHSF | 2519 | HLA-C*07:04 |
| 5608 | WT1 | ENSG00000184937 | AAQFPNHSF | 2519 | HLA-C*12:03 |
| 5609 | WT1 | ENSG00000184937 | AAQFPNHSF | 2519 | HLA-C*14:02 |
| 5610 | WT1 | ENSG00000184937 | AAQFPNHSF | 2519 | HLA-C*16:01 |
| 5611 | WT1 | ENSG00000184937 | AAQFPNHSF | 2519 | HLA-C*16:02 |
| 5612 | WT1 | ENSG00000184937 | AAQFPNHSF | 2519 | HLA-C*16:04 |
| 5613 | WT1 | ENSG00000184937 | AEPHEEQCL | 2520 | HLA-B*40:01 |
| 5614 | WT1 | ENSG00000184937 | AEPHEEQCL | 2520 | HLA-B*44:03 |
| 5615 | WT1 | ENSG00000184937 | AGSSSSVKW | 2521 | HLA-A*32:01 |
| 5616 | WT1 | ENSG00000184937 | AGSSSSVKW | 2521 | HLA-B*27:02 |
| 5617 | WT1 | ENSG00000184937 | AGSSSSVKW | 2521 | HLA-B*44:02 |
| 5618 | WT1 | ENSG00000184937 | AGSSSSVKW | 2521 | HLA-B*44:03 |
| 5619 | WT1 | ENSG00000184937 | AGSSSSVKW | 2521 | HLA-B*58:01 |
| 5620 | WT1 | ENSG00000184937 | AGSSSSVKW | 2521 | HLA-C*12:03 |
| 5621 | WT1 | ENSG00000184937 | AGSSSSVKW | 2521 | HLA-C*16:01 |
| 5622 | WT1 | ENSG00000184937 | AGSSSSVKW | 2521 | HLA-C*16:04 |
| 5623 | WT1 | ENSG00000184937 | AIRNQGYSTV | 2522 | HLA-A*02:03 |
| 5624 | WT1 | ENSG00000184937 | ALLPAVPSL | 2523 | HLA-A*02:01 |
| 5625 | WT1 | ENSG00000184937 | ALLPAVPSL | 2523 | HLA-A*02:03 |
| 5626 | WT1 | ENSG00000184937 | ALLPAVPSL | 2523 | HLA-A*02:04 |
| 5627 | WT1 | ENSG00000184937 | ALLPAVPSL | 2523 | HLA-A*02:07 |
| 5628 | WT1 | ENSG00000184937 | ALLPAVPSL | 2523 | HLA-A*03:01 |
| 5629 | WT1 | ENSG00000184937 | ALLPAVPSL | 2523 | HLA-A*03:02 |
| 5630 | WT1 | ENSG00000184937 | ALLPAVPSL | 2523 | HLA-A*23:01 |
| 5631 | WT1 | ENSG00000184937 | ALLPAVPSL | 2523 | HLA-A*24:02 |
| 5632 | WT1 | ENSG00000184937 | ALLPAVPSL | 2523 | HLA-A*25:01 |
| 5633 | WT1 | ENSG00000184937 | ALLPAVPSL | 2523 | HLA-A*29:02 |
| 5634 | WT1 | ENSG00000184937 | ALLPAVPSL | 2523 | HLA-A*30:01 |
| 5635 | WT1 | ENSG00000184937 | ALLPAVPSL | 2523 | HLA-A*31:01 |
| 5636 | WT1 | ENSG00000184937 | ALLPAVPSL | 2523 | HLA-A*32:01 |
| 5637 | WT1 | ENSG00000184937 | ALLPAVPSL | 2523 | HLA-B*07:02 |
| 5638 | WT1 | ENSG00000184937 | ALLPAVPSL | 2523 | HLA-B*13:02 |
| 5639 | WT1 | ENSG00000184937 | ALLPAVPSL | 2523 | HLA-B*15:01 |
| 5640 | WT1 | ENSG00000184937 | ALLPAVPSL | 2523 | HLA-B*15:03 |
| 5641 | WT1 | ENSG00000184937 | ALLPAVPSL | 2523 | HLA-B*37:01 |
| 5642 | WT1 | ENSG00000184937 | ALLPAVPSL | 2523 | HLA-B*40:01 |
| 5643 | WT1 | ENSG00000184937 | ALLPAVPSL | 2523 | HLA-B*40:02 |
| 5644 | WT1 | ENSG00000184937 | ALLPAVPSL | 2523 | HLA-B*46:01 |
| 5645 | WT1 | ENSG00000184937 | ALLPAVPSL | 2523 | HLA-B*55:01 |
| 5646 | WT1 | ENSG00000184937 | ALLPAVPSL | 2523 | HLA-B*58:01 |
| 5647 | WT1 | ENSG00000184937 | ALLPAVPSL | 2523 | HLA-C*01:02 |
| 5648 | WT1 | ENSG00000184937 | ALLPAVPSL | 2523 | HLA-C*02:02 |
| 5649 | WT1 | ENSG00000184937 | ALLPAVPSL | 2523 | HLA-C*03:03 |
| 5650 | WT1 | ENSG00000184937 | ALLPAVPSL | 2523 | HLA-C*03:04 |
| 5651 | WT1 | ENSG00000184937 | ALLPAVPSL | 2523 | HLA-C*07:04 |
| 5652 | WT1 | ENSG00000184937 | ALLPAVPSL | 2523 | HLA-C*14:02 |
| 5653 | WT1 | ENSG00000184937 | ALPVSGAAQW | 2524 | HLA-A*25:01 |
| 5654 | WT1 | ENSG00000184937 | ALPVSGAAQ | 2525 | HLA-C*01:02 |
| 5655 | WT1 | ENSG00000184937 | APPGASAYGSL | 2526 | HLA-B*07:02 |
| 5656 | WT1 | ENSG00000184937 | APPGASAYGSL | 2526 | HLA-C*01:02 |
| 5657 | WT1 | ENSG00000184937 | APPGASAYGSL | 2526 | HLA-C*07:02 |
| 5658 | WT1 | ENSG00000184937 | APPPAPPPPP | 2527 | HLA-C*04:01 |
| 5659 | WT1 | ENSG00000184937 | APPPAPPPP | 2528 | HLA-C*04:01 |
| 5660 | WT1 | ENSG00000184937 | APPPPPPPPP | 2529 | HLA-C*04:01 |
| 5661 | WT1 | ENSG00000184937 | APPPPPPPP | 2530 | HLA-B*56:01 |
| 5662 | WT1 | ENSG00000184937 | APPPPPPPP | 2530 | HLA-C*04:01 |
| 5663 | WT1 | ENSG00000184937 | APTLVRSASET | 2531 | HLA-B*07:02 |
| 5664 | WT1 | ENSG00000184937 | APTLVRSAS | 2532 | HLA-B*56:01 |
| 5665 | WT1 | ENSG00000184937 | APTLVRSA | 2533 | HLA-B*07:02 |
| 5666 | WT1 | ENSG00000184937 | APTLVRSA | 2533 | HLA-B*54:01 |
| 5667 | WT1 | ENSG00000184937 | APTLVRSA | 2533 | HLA-B*55:01 |
| 5668 | WT1 | ENSG00000184937 | APTLVRSA | 2533 | HLA-B*56:01 |
| 5669 | WT1 | ENSG00000184937 | APVLDFAPPGA | 2534 | HLA-B*56:01 |
| 5670 | WT1 | ENSG00000184937 | APVLDFAPPG | 2535 | HLA-B*56:01 |
| 5671 | WT1 | ENSG00000184937 | APVLDFAPP | 2536 | HLA-B*56:01 |
| 5672 | WT1 | ENSG00000184937 | APYLPSCL | 2537 | HLA-B*07:02 |
| 5673 | WT1 | ENSG00000184937 | APYLPSCL | 2537 | HLA-B*08:01 |
| 5674 | WT1 | ENSG00000184937 | APYLPSCL | 2537 | HLA-B*56:01 |
| 5675 | WT1 | ENSG00000184937 | AQFPNHSFK | 2538 | HLA-A*03:01 |
| 5676 | WT1 | ENSG00000184937 | AQFPNHSFK | 2538 | HLA-A*03:02 |
| 5677 | WT1 | ENSG00000184937 | AQFPNHSFK | 2538 | HLA-A*11:01 |
| 5678 | WT1 | ENSG00000184937 | AQFPNHSFK | 2538 | HLA-A*31:01 |
| 5679 | WT1 | ENSG00000184937 | AQFPNHSFK | 2538 | HLA-B*27:05 |
| 5680 | WT1 | ENSG00000184937 | AQFPNHSF | 2539 | HLA-A*23:01 |
| 5681 | WT1 | ENSG00000184937 | AQFPNHSF | 2539 | HLA-A*30:02 |
| 5682 | WT1 | ENSG00000184937 | AQFPNHSF | 2539 | HLA-A*32:01 |
| 5683 | WT1 | ENSG00000184937 | AQFPNHSF | 2539 | HLA-B*13:02 |
| 5684 | WT1 | ENSG00000184937 | AQFPNHSF | 2539 | HLA-B*15:01 |
| 5685 | WT1 | ENSG00000184937 | AQFPNHSF | 2539 | HLA-B*15:03 |
| 5686 | WT1 | ENSG00000184937 | AQFPNHSF | 2539 | HLA-B*27:05 |
| 5687 | WT1 | ENSG00000184937 | AQFPNHSF | 2539 | HLA-B*37:01 |
| 5688 | WT1 | ENSG00000184937 | AQFPNHSF | 2539 | HLA-B*39:01 |
| 5689 | WT1 | ENSG00000184937 | AQFPNHSF | 2539 | HLA-B*44:02 |
| 5690 | WT1 | ENSG00000184937 | AQFPNHSF | 2539 | HLA-B*46:01 |
| 5691 | WT1 | ENSG00000184937 | AQFPNHSF | 2539 | HLA-B*57:01 |
| 5692 | WT1 | ENSG00000184937 | AQFPNHSF | 2539 | HLA-B*58:01 |
| 5693 | WT1 | ENSG00000184937 | AQFPNHSF | 2539 | HLA-C*02:02 |
| 5694 | WT1 | ENSG00000184937 | AQFPNHSF | 2539 | HLA-C*14:02 |
| 5695 | WT1 | ENSG00000184937 | AQFPNHSF | 2539 | HLA-C*16:04 |
| 5696 | WT1 | ENSG00000184937 | AQWAPVLDF | 2540 | HLA-B*13:02 |
| 5697 | WT1 | ENSG00000184937 | AQWAPVLDF | 2540 | HLA-B*15:01 |
| 5698 | WT1 | ENSG00000184937 | AQWAPVLDF | 2540 | HLA-B*15:03 |
| 5699 | WT1 | ENSG00000184937 | ARSDELVREI | 2541 | HLA-B*27:05 |
| 5700 | WT1 | ENSG00000184937 | ASETSEKRPF | 2542 | HLA-C*16:01 |
| 5701 | WT1 | ENSG00000184937 | ASSGQARMF | 2543 | HLA-A*32:01 |
| 5702 | WT1 | ENSG00000184937 | ASSGQARMF | 2543 | HLA-B*58:01 |
| 5703 | WT1 | ENSG00000184937 | ASSGQARMF | 2543 | HLA-C*02:02 |
| 5704 | WT1 | ENSG00000184937 | ASSGQARMF | 2543 | HLA-C*16:01 |
| 5705 | WT1 | ENSG00000184937 | ASSGQARMF | 2543 | HLA-C*16:02 |
| 5706 | WT1 | ENSG00000184937 | CALPVSGAAQW | 2544 | HLA-B*57:01 |
| 5707 | WT1 | ENSG00000184937 | CALPVSGAAQW | 2544 | HLA-B*58:01 |
| 5708 | WT1 | ENSG00000184937 | CALPVSGAA | 2545 | HLA-B*56:01 |
| 5709 | WT1 | ENSG00000184937 | DELVRHHNM | 2546 | HLA-B*08:01 |
| 5710 | WT1 | ENSG00000184937 | DELVRHHNM | 2546 | HLA-B*37:01 |
| 5711 | WT1 | ENSG00000184937 | DFAPPGASAY | 2547 | HLA-A*25:01 |
| 5712 | WT1 | ENSG00000184937 | DFAPPGASAY | 2547 | HLA-A*26:01 |
| 5713 | WT1 | ENSG00000184937 | DFAPPGASAY | 2547 | HLA-A*29:02 |
| 5714 | WT1 | ENSG00000184937 | DFAPPGASAY | 2547 | HLA-A*30:02 |
| 5715 | WT1 | ENSG00000184937 | DFAPPGASAY | 2547 | HLA-C*14:02 |
| 5716 | WT1 | ENSG00000184937 | DFAPPGASA | 2548 | HLA-C*14:02 |
| 5717 | WT1 | ENSG00000184937 | DHLKTHTR | 2549 | HLA-A*33:01 |
| 5718 | WT1 | ENSG00000184937 | DPMGQQGSL | 2550 | HLA-B*07:02 |
| 5719 | WT1 | ENSG00000184937 | DPMGQQGSL | 2550 | HLA-B*08:01 |
| 5720 | WT1 | ENSG00000184937 | DPMGQQGSL | 2550 | HLA-B*35:01 |
| 5721 | WT1 | ENSG00000184937 | DPMGQQGSL | 2550 | HLA-B*35:03 |
| 5722 | WT1 | ENSG00000184937 | DPMGQQGSL | 2550 | HLA-B*51:01 |
| 5723 | WT1 | ENSG00000184937 | DPMGQQGSL | 2550 | HLA-C*07:02 |
| 5724 | WT1 | ENSG00000184937 | DVRDLNALL | 2551 | HLA-A*25:01 |
| 5725 | WT1 | ENSG00000184937 | DVRDLNALL | 2551 | HLA-A*26:01 |
| 5726 | WT1 | ENSG00000184937 | DVRDLNALL | 2551 | HLA-A*33:01 |
| 5727 | WT1 | ENSG00000184937 | DVRDLNAL | 2552 | HLA-B*08:01 |
| 5728 | WT1 | ENSG00000184937 | DVRRVPGV | 2553 | HLA-B*51:01 |
| 5729 | WT1 | ENSG00000184937 | EEQCLSAF | 2554 | HLA-B*18:01 |
| 5730 | WT1 | ENSG00000184937 | EGQSNHSTGY | 2555 | HLA-A*26:01 |
| 5731 | WT1 | ENSG00000184937 | EGQSNHSTGY | 2555 | HLA-A*30:02 |
| 5732 | WT1 | ENSG00000184937 | EGQSNHSTGY | 2555 | HLA-B*44:02 |
| 5733 | WT1 | ENSG00000184937 | EGQSNHSTGY | 2555 | HLA-B*44:03 |
| 5734 | WT1 | ENSG00000184937 | EGQSNHSTGY | 2555 | HLA-C*04:01 |
| 5735 | WT1 | ENSG00000184937 | EGQSNHSTGY | 2555 | HLA-C*07:01 |
| 5736 | WT1 | ENSG00000184937 | EQQYSVPPPVY | 2556 | HLA-A*30:02 |
| 5737 | WT1 | ENSG00000184937 | ESQPAIRNQGY | 2557 | HLA-A*01:01 |
| 5738 | WT1 | ENSG00000184937 | ESQPAIRNQGY | 2557 | HLA-A*25:01 |
| 5739 | WT1 | ENSG00000184937 | ESQPAIRNQGY | 2557 | HLA-A*26:01 |
| 5740 | WT1 | ENSG00000184937 | ESQPAIRNQGY | 2557 | HLA-A*30:02 |
| 5741 | WT1 | ENSG00000184937 | ESQPAIRNQGY | 2557 | HLA-B*44:02 |
| 5742 | WT1 | ENSG00000184937 | ETSEKRPFM | 2558 | HLA-A*26:01 |
| 5743 | WT1 | ENSG00000184937 | FAPPGASAY | 2559 | HLA-A*01:01 |
| 5744 | WT1 | ENSG00000184937 | FAPPGASAY | 2559 | HLA-A*25:01 |
| 5745 | WT1 | ENSG00000184937 | FAPPGASAY | 2559 | HLA-A*26:01 |
| 5746 | WT1 | ENSG00000184937 | FAPPGASAY | 2559 | HLA-A*29:02 |
| 5747 | WT1 | ENSG00000184937 | FAPPGASAY | 2559 | HLA-A*30:02 |
| 5748 | WT1 | ENSG00000184937 | FAPPGASAY | 2559 | HLA-A*32:01 |
| 5749 | WT1 | ENSG00000184937 | FAPPGASAY | 2559 | HLA-B*15:01 |
| 5750 | WT1 | ENSG00000184937 | FAPPGASAY | 2559 | HLA-B*15:03 |
| 5751 | WT1 | ENSG00000184937 | FAPPGASAY | 2559 | HLA-B*35:01 |
| 5752 | WT1 | ENSG00000184937 | FAPPGASAY | 2559 | HLA-B*39:01 |
| 5753 | WT1 | ENSG00000184937 | FAPPGASAY | 2559 | HLA-B*46:01 |
| 5754 | WT1 | ENSG00000184937 | FAPPGASAY | 2559 | HLA-B*51:01 |
| 5755 | WT1 | ENSG00000184937 | FAPPGASAY | 2559 | HLA-B*55:01 |
| 5756 | WT1 | ENSG00000184937 | FAPPGASAY | 2559 | HLA-B*58:01 |
| 5757 | WT1 | ENSG00000184937 | FAPPGASAY | 2559 | HLA-C*01:02 |
| 5758 | WT1 | ENSG00000184937 | FAPPGASAY | 2559 | HLA-C*02:02 |
| 5759 | WT1 | ENSG00000184937 | FAPPGASAY | 2559 | HLA-C*03:03 |
| 5760 | WT1 | ENSG00000184937 | FAPPGASAY | 2559 | HLA-C*03:04 |
| 5761 | WT1 | ENSG00000184937 | FAPPGASAY | 2559 | HLA-C*05:01 |
| 5762 | WT1 | ENSG00000184937 | FAPPGASAY | 2559 | HLA-C*07:04 |
| 5763 | WT1 | ENSG00000184937 | FAPPGASAY | 2559 | HLA-C*12:03 |
| 5764 | WT1 | ENSG00000184937 | FAPPGASAY | 2559 | HLA-C*14:02 |
| 5765 | WT1 | ENSG00000184937 | FAPPGASAY | 2559 | HLA-C*16:01 |
| 5766 | WT1 | ENSG00000184937 | FAPPGASAY | 2559 | HLA-C*16:02 |
| 5767 | WT1 | ENSG00000184937 | FAPPGASAY | 2559 | HLA-C*16:04 |
| 5768 | WT1 | ENSG00000184937 | FGPPPPSQA | 2560 | HLA-A*02:01 |
| 5769 | WT1 | ENSG00000184937 | FGPPPPSQA | 2560 | HLA-A*02:07 |
| 5770 | WT1 | ENSG00000184937 | FPNAPYLPSCL | 2561 | HLA-B*35:03 |
| 5771 | WT1 | ENSG00000184937 | FPNAPYLPSC | 2562 | HLA-B*54:01 |
| 5772 | WT1 | ENSG00000184937 | FPNAPYLPSC | 2562 | HLA-B*56:01 |
| 5773 | WT1 | ENSG00000184937 | FPNAPYLPS | 2563 | HLA-B*54:01 |
| 5774 | WT1 | ENSG00000184937 | FPNAPYLP | 2564 | HLA-B*54:01 |
| 5775 | WT1 | ENSG00000184937 | FTGTAGACRY | 2565 | HLA-A*01:01 |
| 5776 | WT1 | ENSG00000184937 | FTGTAGACRY | 2565 | HLA-A*29:02 |
| 5777 | WT1 | ENSG00000184937 | FTGTAGACRY | 2565 | HLA-A*30:02 |
| 5778 | WT1 | ENSG00000184937 | FTGTAGACR | 2566 | HLA-A*68:01 |
| 5779 | WT1 | ENSG00000184937 | FTGTAGACR | 2566 | HLA-C*07:06 |
| 5780 | WT1 | ENSG00000184937 | FTGTAGAC | 2567 | HLA-C*12:03 |
| 5781 | WT1 | ENSG00000184937 | FTVHFSGQF | 2568 | HLA-A*25:01 |
| 5782 | WT1 | ENSG00000184937 | FTVHFSGQF | 2568 | HLA-A*26:01 |
| 5783 | WT1 | ENSG00000184937 | FTVHFSGQF | 2568 | HLA-A*29:02 |
| 5784 | WT1 | ENSG00000184937 | FTVHFSGQF | 2568 | HLA-B*46:01 |
| 5785 | WT1 | ENSG00000184937 | FTVHFSGQF | 2568 | HLA-B*57:01 |
| 5786 | WT1 | ENSG00000184937 | FTVHFSGQF | 2568 | HLA-C*02:02 |
| 5787 | WT1 | ENSG00000184937 | GAAQWAPVL | 2569 | HLA-C*03:03 |
| 5788 | WT1 | ENSG00000184937 | GAAQWAPVL | 2569 | HLA-C*03:04 |
| 5789 | WT1 | ENSG00000184937 | GATLKGVAA | 2570 | HLA-B*54:01 |
| 5790 | WT1 | ENSG00000184937 | GATLKGVAA | 2570 | HLA-B*56:01 |
| 5791 | WT1 | ENSG00000184937 | GATLKGVAA | 2570 | HLA-C*03:04 |
| 5792 | WT1 | ENSG00000184937 | GATLKGVAA | 2570 | HLA-C*16:01 |
| 5793 | WT1 | ENSG00000184937 | GATLKGVA | 2571 | HLA-C*16:01 |
| 5794 | WT1 | ENSG00000184937 | GEKPYQCDF | 2572 | HLA-A*30:01 |
| 5795 | WT1 | ENSG00000184937 | GEKPYQCDF | 2572 | HLA-B*37:01 |
| 5796 | WT1 | ENSG00000184937 | GEKPYQCDF | 2572 | HLA-B*44:02 |
| 5797 | WT1 | ENSG00000184937 | GEKPYQCDF | 2572 | HLA-B*44:03 |
| 5798 | WT1 | ENSG00000184937 | GEKPYQCDF | 2572 | HLA-C*16:04 |
| 5799 | WT1 | ENSG00000184937 | GPAPPPAPP | 2573 | HLA-B*56:01 |
| 5800 | WT1 | ENSG00000184937 | GPFGPPPPSQA | 2574 | HLA-B*54:01 |
| 5801 | WT1 | ENSG00000184937 | GPFGPPPPSQA | 2574 | HLA-B*55:01 |
| 5802 | WT1 | ENSG00000184937 | GPFGPPPPSQA | 2574 | HLA-B*56:01 |
| 5803 | WT1 | ENSG00000184937 | GPFGPPPPSQ | 2575 | HLA-B*54:01 |
| 5804 | WT1 | ENSG00000184937 | GPFGPPPPS | 2576 | HLA-B*54:01 |
| 5805 | WT1 | ENSG00000184937 | GPFGPPPPS | 2576 | HLA-B*56:01 |
| 5806 | WT1 | ENSG00000184937 | GPFGPPPP | 2577 | HLA-B*56:01 |
| 5807 | WT1 | ENSG00000184937 | GQARMFPNAPY | 2578 | HLA-A*30:02 |
| 5808 | WT1 | ENSG00000184937 | GQARMFPNAPY | 2578 | HLA-B*15:01 |
| 5809 | WT1 | ENSG00000184937 | GQFTGTAGACR | 2579 | HLA-A*31:01 |
| 5810 | WT1 | ENSG00000184937 | GQFTGTAGACR | 2579 | HLA-B*13:02 |
| 5811 | WT1 | ENSG00000184937 | GQFTGTAGACR | 2579 | HLA-B*27:05 |
| 5812 | WT1 | ENSG00000184937 | GQFTGTAGACR | 2579 | HLA-C*07:06 |
| 5813 | WT1 | ENSG00000184937 | GQFTGTAGAC | 2580 | HLA-B*13:02 |
| 5814 | WT1 | ENSG00000184937 | GQFTGTAGAC | 2580 | HLA-B*15:01 |
| 5815 | WT1 | ENSG00000184937 | GQFTGTAGAC | 2580 | HLA-B*15:03 |
| 5816 | WT1 | ENSG00000184937 | GQFTGTAGAC | 2580 | HLA-B*27:05 |
| 5817 | WT1 | ENSG00000184937 | GQFTGTAGAC | 2580 | HLA-C*16:04 |
| 5818 | WT1 | ENSG00000184937 | GQFTGTAGA | 2581 | HLA-A*02:01 |
| 5819 | WT1 | ENSG00000184937 | GQFTGTAGA | 2581 | HLA-A*02:03 |
| 5820 | WT1 | ENSG00000184937 | GQFTGTAGA | 2581 | HLA-A*32:01 |
| 5821 | WT1 | ENSG00000184937 | GQFTGTAGA | 2581 | HLA-B*13:02 |
| 5822 | WT1 | ENSG00000184937 | GQFTGTAGA | 2581 | HLA-B*15:01 |
| 5823 | WT1 | ENSG00000184937 | GQFTGTAGA | 2581 | HLA-B*15:03 |
| 5824 | WT1 | ENSG00000184937 | GQFTGTAGA | 2581 | HLA-B*27:05 |
| 5825 | WT1 | ENSG00000184937 | GQQGSLGEQQY | 2582 | HLA-A*30:02 |
| 5826 | WT1 | ENSG00000184937 | GQQGSLGEQQY | 2582 | HLA-B*15:01 |
| 5827 | WT1 | ENSG00000184937 | GQQGSLGEQQY | 2582 | HLA-B*15:03 |
| 5828 | WT1 | ENSG00000184937 | GQQGSLGEQQY | 2582 | HLA-B*27:05 |
| 5829 | WT1 | ENSG00000184937 | GQQGSLGEQQY | 2582 | HLA-B*39:01 |
| 5830 | WT1 | ENSG00000184937 | GQQGSLGEQQY | 2582 | HLA-C*07:04 |
| 5831 | WT1 | ENSG00000184937 | GQQGSLGEQQY | 2582 | HLA-C*16:04 |
| 5832 | WT1 | ENSG00000184937 | GQSNHSTGY | 2583 | HLA-A*26:01 |
| 5833 | WT1 | ENSG00000184937 | GQSNHSTGY | 2583 | HLA-A*29:02 |
| 5834 | WT1 | ENSG00000184937 | GQSNHSTGY | 2583 | HLA-A*30:02 |
| 5835 | WT1 | ENSG00000184937 | GQSNHSTGY | 2583 | HLA-A*32:01 |
| 5836 | WT1 | ENSG00000184937 | GQSNHSTGY | 2583 | HLA-B*13:02 |
| 5837 | WT1 | ENSG00000184937 | GQSNHSTGY | 2583 | HLA-B*15:01 |
| 5838 | WT1 | ENSG00000184937 | GQSNHSTGY | 2583 | HLA-B*15:03 |
| 5839 | WT1 | ENSG00000184937 | GQSNHSTGY | 2583 | HLA-B*27:02 |
| 5840 | WT1 | ENSG00000184937 | GQSNHSTGY | 2583 | HLA-B*27:05 |
| 5841 | WT1 | ENSG00000184937 | GQSNHSTGY | 2583 | HLA-B*39:01 |
| 5842 | WT1 | ENSG00000184937 | GQSNHSTGY | 2583 | HLA-B*44:03 |
| 5843 | WT1 | ENSG00000184937 | GQSNHSTGY | 2583 | HLA-B*46:01 |
| 5844 | WT1 | ENSG00000184937 | GQSNHSTGY | 2583 | HLA-C*02:02 |
| 5845 | WT1 | ENSG00000184937 | GQSNHSTGY | 2583 | HLA-C*07:04 |
| 5846 | WT1 | ENSG00000184937 | GQSNHSTGY | 2583 | HLA-C*16:04 |
| 5847 | WT1 | ENSG00000184937 | GSLGGPAPPP | 2584 | HLA-A*11:01 |
| 5848 | WT1 | ENSG00000184937 | GSLGGPAPPP | 2584 | HLA-C*06:02 |
| 5849 | WT1 | ENSG00000184937 | GSLGGPAPPP | 2584 | HLA-C*07:02 |
| 5850 | WTI | ENSG00000184937 | GSQALLLRTPY | 2585 | HLA-A*30:02 |
| 5851 | WT1 | ENSG00000184937 | GSSSSVKW | 2586 | HLA-A*32:01 |
| 5852 | WT1 | ENSG00000184937 | GSSSSVKW | 2586 | HLA-B*57:01 |
| 5853 | WT1 | ENSG00000184937 | GSSSSVKW | 2586 | HLA-B*58:01 |
| 5854 | WT1 | ENSG00000184937 | GTAGACRY | 2587 | HLA-A*30:02 |
| 5855 | WT1 | ENSG00000184937 | GVAAGSSSSVK | 2588 | HLA-A*03:01 |
| 5856 | WT1 | ENSG00000184937 | GVAAGSSSSVK | 2588 | HLA-A*03:02 |
| 5857 | WT1 | ENSG00000184937 | GVAAGSSSSVK | 2588 | HLA-A*11:01 |
| 5858 | WT1 | ENSG00000184937 | GVAAGSSSSV | 2589 | HLA-A*02:03 |
| 5859 | WT1 | ENSG00000184937 | GVAAGSSSSV | 2589 | HLA-B*13:02 |
| 5860 | WT1 | ENSG00000184937 | GVAPTLVRSA | 2590 | HLA-B*56:01 |
| 5861 | WT1 | ENSG00000184937 | GVFRGIQDV | 2591 | HLA-A*02:01 |
| 5862 | WT1 | ENSG00000184937 | GVFRGIQDV | 2591 | HLA-A*02:03 |
| 5863 | WT1 | ENSG00000184937 | GVFRGIQDV | 2591 | HLA-A*02:04 |
| 5864 | WT1 | ENSG00000184937 | GVFRGIQDV | 2591 | HLA-B*13:02 |
| 5865 | WTI | ENSG00000184937 | HAAQFPNHSF | 2592 | HLA-A*25:01 |
| 5866 | WT1 | ENSG00000184937 | HAAQFPNHSF | 2592 | HLA-A*26:01 |
| 5867 | WT1 | ENSG00000184937 | HAAQFPNHSF | 2592 | HLA-A*32:01 |
| 5868 | WT1 | ENSG00000184937 | HAAQFPNHSF | 2592 | HLA-A*33:01 |
| 5869 | WT1 | ENSG00000184937 | HAAQFPNHSF | 2592 | HLA-A*68:02 |
| 5870 | WT1 | ENSG00000184937 | HAAQFPNHSF | 2592 | HLA-B*35:01 |
| 5871 | WT1 | ENSG00000184937 | HAAQFPNHSF | 2592 | HLA-B*35:03 |
| 5872 | WT1 | ENSG00000184937 | HAAQFPNHSF | 2592 | HLA-B*46:01 |
| 5873 | WT1 | ENSG00000184937 | HAAQFPNHSF | 2592 | HLA-B*54:01 |
| 5874 | WT1 | ENSG00000184937 | HAAQFPNHSF | 2592 | HLA-B*57:01 |
| 5875 | WT1 | ENSG00000184937 | HAAQFPNHSF | 2592 | HLA-B*58:01 |
| 5876 | WT1 | ENSG00000184937 | HAAQFPNHSF | 2592 | HLA-C*02:02 |
| 5877 | WT1 | ENSG00000184937 | HAAQFPNHSF | 2592 | HLA-C*03:03 |
| 5878 | WT1 | ENSG00000184937 | HAAQFPNHSF | 2592 | HLA-C*03:04 |
| 5879 | WT1 | ENSG00000184937 | HAAQFPNHSF | 2592 | HLA-C*07:06 |
| 5880 | WT1 | ENSG00000184937 | HAAQFPNHSF | 2592 | HLA-C*16:04 |
| 5881 | WT1 | ENSG00000184937 | HEDPMGQQGSL | 2593 | HLA-A*30:01 |
| 5882 | WT1 | ENSG00000184937 | HEDPMGQQGSL | 2593 | HLA-B*39:01 |
| 5883 | WT1 | ENSG00000184937 | HEDPMGQQGSL | 2593 | HLA-B*40:01 |
| 5884 | WT1 | ENSG00000184937 | HEDPMGQQGSL | 2593 | HLA-B*49:01 |
| 5885 | WT1 | ENSG00000184937 | HEDPMGQQG | 2594 | HLA-B*49:01 |
| 5886 | WT1 | ENSG00000184937 | HEEQCLSAF | 2595 | HLA-B*18:01 |
| 5887 | WT1 | ENSG00000184937 | HHAAQFPNHSF | 2596 | HLA-B*38:01 |
| 5888 | WT1 | ENSG00000184937 | HQRNMTKL | 2597 | HLA-B*15:03 |
| 5889 | WT1 | ENSG00000184937 | HSFIKQEPSW | 2598 | HLA-B*57:01 |
| 5890 | WT1 | ENSG00000184937 | HTPSHHAAQF | 2599 | HLA-A*25:01 |
| 5891 | WT1 | ENSG00000184937 | HTPSHHAAQF | 2599 | HLA-A*26:01 |
| 5892 | WT1 | ENSG00000184937 | HTTPILCGA | 2600 | HLA-A*68:02 |
| 5893 | WT1 | ENSG00000184937 | IRNQGYSTVTF | 2601 | HLA-B*27:02 |
| 5894 | WT1 | ENSG00000184937 | IRNQGYSTVTF | 2601 | HLA-C*16:04 |
| 5895 | WT1 | ENSG00000184937 | LDFAPPGASAY | 2602 | HLA-A*30:02 |
| 5896 | WT1 | ENSG00000184937 | LDFAPPGASAY | 2602 | HLA-B*18:01 |
| 5897 | WT1 | ENSG00000184937 | LDFAPPGASAY | 2602 | HLA-C*16:04 |
| 5898 | WT1 | ENSG00000184937 | LGATLKGVAA | 2603 | HLA-B*54:01 |
| 5899 | WT1 | ENSG00000184937 | LGGGGGCAL | 2604 | HLA-C*03:04 |
| 5900 | WT1 | ENSG00000184937 | LLPAVPSLGG | 2605 | HLA-A*02:07 |
| 5901 | WT1 | ENSG00000184937 | LLPAVPSL | 2606 | HLA-A*02:07 |
| 5902 | WT1 | ENSG00000184937 | LLPAVPSL | 2606 | HLA-A*24:02 |
| 5903 | WT1 | ENSG00000184937 | LLPAVPSL | 2606 | HLA-B*51:01 |
| 5904 | WT1 | ENSG00000184937 | LLPAVPSL | 2606 | HLA-C*01:02 |
| 5905 | WT1 | ENSG00000184937 | LPAVPSLGG | 2607 | HLA-B*51:01 |
| 5906 | WT1 | ENSG00000184937 | LPAVPSLGG | 2607 | HLA-B*54:01 |
| 5907 | WT1 | ENSG00000184937 | LPAVPSLGG | 2607 | HLA-B*56:01 |
| 5908 | WT1 | ENSG00000184937 | LPVSGAAQW | 2608 | HLA-A*25:01 |
| 5909 | WT1 | ENSG00000184937 | LPVSGAAQW | 2608 | HLA-B*35:01 |
| 5910 | WT1 | ENSG00000184937 | LPVSGAAQW | 2608 | HLA-B*35:03 |
| 5911 | WT1 | ENSG00000184937 | LPVSGAAQW | 2608 | HLA-B*51:01 |
| 5912 | WT1 | ENSG00000184937 | LPVSGAAQW | 2608 | HLA-B*56:01 |
| 5913 | WT1 | ENSG00000184937 | LSHLQMHSR | 2609 | HLA-A*33:01 |
| 5914 | WT1 | ENSG00000184937 | LVRSASETSEK | 2610 | HLA-A*03:01 |
| 5915 | WT1 | ENSG00000184937 | LYQMTSQL | 2611 | HLA-C*14:02 |
| 5916 | WT1 | ENSG00000184937 | MGSDVRDL | 2612 | HLA-C*16:01 |
| 5917 | WT1 | ENSG00000184937 | MHQRNMTKL | 2613 | HLA-B*38:01 |
| 5918 | WT1 | ENSG00000184937 | MTKLQLAL | 2614 | HLA-B*08:01 |
| 5919 | WT1 | ENSG00000184937 | MTKLQLAL | 2614 | HLA-C*03:04 |
| 5920 | WT1 | ENSG00000184937 | MTKLQLAL | 2614 | HLA-C*07:01 |
| 5921 | WT1 | ENSG00000184937 | MTSQLECMTVV | 2615 | HLA-A*25:01 |
| 5922 | WT1 | ENSG00000184937 | MTSQLECMTVV | 2615 | HLA-B*57:01 |
| 5923 | WT1 | ENSG00000184937 | MTSQLECMTVV | 2615 | HLA-B*58:01 |
| 5924 | WT1 | ENSG00000184937 | NAPYLPSCL | 2616 | HLA-C*01:02 |
| 5925 | WT1 | ENSG00000184937 | NAPYLPSC | 2617 | HLA-B*51:01 |
| 5926 | WT1 | ENSG00000184937 | NLGATLKGV | 2618 | HLA-A*02:03 |
| 5927 | WT1 | ENSG00000184937 | NLYQMTSQL | 2619 | HLA-A*02:01 |
| 5928 | WT1 | ENSG00000184937 | NLYQMTSQL | 2619 | HLA-A*02:03 |
| 5929 | WT1 | ENSG00000184937 | NLYQMTSQL | 2619 | HLA-C*01:02 |
| 5930 | WT1 | ENSG00000184937 | NLYQMTSQL | 2619 | HLA-C*14:02 |
| 5931 | WT1 | ENSG00000184937 | NMTKLQLAL | 2620 | HLA-B*08:01 |
| 5932 | WT1 | ENSG00000184937 | NMTKLQLAL | 2620 | HLA-B*13:02 |
| 5933 | WT1 | ENSG00000184937 | NQGYSTVTF | 2621 | HLA-B*15:01 |
| 5934 | WT1 | ENSG00000184937 | NQGYSTVTF | 2621 | HLA-B*15:03 |
| 5935 | WT1 | ENSG00000184937 | NQGYSTVTF | 2621 | HLA-B*18:01 |
| 5936 | WT1 | ENSG00000184937 | NQGYSTVTF | 2621 | HLA-B*38:01 |
| 5937 | WT1 | ENSG00000184937 | NQGYSTVTF | 2621 | HLA-B*39:01 |
| 5938 | WT1 | ENSG00000184937 | NQGYSTVTF | 2621 | HLA-C*07:04 |
| 5939 | WT1 | ENSG00000184937 | NQGYSTVTF | 2621 | HLA-C*14:02 |
| 5940 | WT1 | ENSG00000184937 | NQMNLGATLK | 2622 | HLA-A*11:01 |
| 5941 | WT1 | ENSG00000184937 | NQMNLGATL | 2623 | HLA-A*23:01 |
| 5942 | WT1 | ENSG00000184937 | NQMNLGATL | 2623 | HLA-B*13:02 |
| 5943 | WT1 | ENSG00000184937 | NQMNLGATL | 2623 | HLA-B*15:01 |
| 5944 | WT1 | ENSG00000184937 | NQMNLGATL | 2623 | HLA-B*15:03 |
| 5945 | WT1 | ENSG00000184937 | NQMNLGATL | 2623 | HLA-B*27:05 |
| 5946 | WT1 | ENSG00000184937 | NQMNLGATL | 2623 | HLA-B*38:01 |
| 5947 | WT1 | ENSG00000184937 | NQMNLGATL | 2623 | HLA-B*39:01 |
| 5948 | WT1 | ENSG00000184937 | NQMNLGATL | 2623 | HLA-C*03:03 |
| 5949 | WT1 | ENSG00000184937 | NQMNLGATL | 2623 | HLA-C*07:02 |
| 5950 | WT1 | ENSG00000184937 | NQMNLGATL | 2623 | HLA-C*07:04 |
| 5951 | WT1 | ENSG00000184937 | NQMNLGATL | 2623 | HLA-C*14:02 |
| 5952 | WT1 | ENSG00000184937 | NQMNLGATL | 2623 | HLA-C*16:04 |
| 5953 | WT1 | ENSG00000184937 | PPPPPPPPP | 2624 | HLA-C*04:01 |
| 5954 | WT1 | ENSG00000184937 | QALLLRTPY | 2625 | HLA-A*01:01 |
| 5955 | WT1 | ENSG00000184937 | QALLLRTPY | 2625 | HLA-A*29:02 |
| 5956 | WT1 | ENSG00000184937 | QALLLRTPY | 2625 | HLA-A*30:02 |
| 5957 | WT1 | ENSG00000184937 | QALLLRTPY | 2625 | HLA-B*15:03 |
| 5958 | WT1 | ENSG00000184937 | QALLLRTPY | 2625 | HLA-B*35:01 |
| 5959 | WT1 | ENSG00000184937 | QALLLRTPY | 2625 | HLA-B*46:01 |
| 5960 | WT1 | ENSG00000184937 | QALLLRTPY | 2625 | HLA-B*57:01 |
| 5961 | WT1 | ENSG00000184937 | QALLLRTPY | 2625 | HLA-C*02:02 |
| 5962 | WT1 | ENSG00000184937 | QALLLRTPY | 2625 | HLA-C*07:01 |
| 5963 | WT1 | ENSG00000184937 | QALLLRTPY | 2625 | HLA-C*07:04 |
| 5964 | WT1 | ENSG00000184937 | QALLLRTPY | 2625 | HLA-C*16:01 |
| 5965 | WT1 | ENSG00000184937 | QASSGQARMF | 2626 | HLA-C*16:01 |
| 5966 | WT1 | ENSG00000184937 | QASSGQARMF | 2626 | HLA-C*16:02 |
| 5967 | WT1 | ENSG00000184937 | QASSGQARM | 2627 | HLA-C*16:01 |
| 5968 | WT1 | ENSG00000184937 | QDVRRVPGV | 2628 | HLA-B*37:01 |
| 5969 | WT1 | ENSG00000184937 | QFTGTAGACRY | 2629 | HLA-A*29:02 |
| 5970 | WT1 | ENSG00000184937 | QGYSTVTF | 2630 | HLA-B*08:01 |
| 5971 | WT1 | ENSG00000184937 | QGYSTVTF | 2630 | HLA-B*15:03 |
| 5972 | WT1 | ENSG00000184937 | QGYSTVTF | 2630 | HLA-B*18:01 |
| 5973 | WT1 | ENSG00000184937 | QGYSTVTF | 2630 | HLA-B*37:01 |
| 5974 | WT1 | ENSG00000184937 | QGYSTVTF | 2630 | HLA-B*46:01 |
| 5975 | WT1 | ENSG00000184937 | QGYSTVTF | 2630 | HLA-C*12:03 |
| 5976 | WT1 | ENSG00000184937 | QMNLGATLK | 2631 | HLA-A*03:01 |
| 5977 | WT1 | ENSG00000184937 | QMNLGATLK | 2631 | HLA-A*03:02 |
| 5978 | WTI | ENSG00000184937 | QMNLGATLK | 2631 | HLA-A*II:01 |
| 5979 | WT1 | ENSG00000184937 | QMNLGATL | 2632 | HLA-B*07:02 |
| 5980 | WT1 | ENSG00000184937 | QMNLGATL | 2632 | HLA-B*08:01 |
| 5981 | WT1 | ENSG00000184937 | QMNLGATL | 2632 | HLA-C*01:02 |
| 5982 | WT1 | ENSG00000184937 | QMNLGATL | 2632 | HLA-C*14:02 |
| 5982 | WT1 | ENSG00000184937 | QPAIRNQGY | 2633 | HLA-B*35:01 |
| 5984 | WT1 | ENSG00000184937 | QPAIRNQGY | 2633 | HLA-B*55:01 |
| 5985 | WT1 | ENSG00000184937 | QQGSLGEQQY | 2634 | HLA-A*30:02 |
| 5986 | WT1 | ENSG00000184937 | QQGSLGEQQY | 2634 | HLA-B*15:01 |
| 5987 | WT1 | ENSG00000184937 | QQGSLGEQQY | 2634 | HLA-C*07:04 |
| 5988 | WT1 | ENSG00000184937 | QQYSVPPPVY | 2635 | HLA-A*30:02 |
| 5989 | WT1 | ENSG00000184937 | QQYSVPPPVY | 2635 | HLA-A*32:01 |
| 5990 | WT1 | ENSG00000184937 | QQYSVPPPVY | 2635 | HLA-B*15:01 |
| 5991 | WT1 | ENSG00000184937 | QQYSVPPPVY | 2635 | HLA-B*15:03 |
| 5992 | WT1 | ENSG00000184937 | QQYSVPPPVY | 2635 | HLA-B*39:01 |
| 5993 | WTI | ENSG00000184937 | QQYSVPPPVY | 2635 | HLA-C*I6:04 |
| 5994 | WT1 | ENSG00000184937 | QQYSVPPPV | 2636 | HLA-A*02:01 |
| 5995 | WT1 | ENSG00000184937 | QQYSVPPPV | 2636 | HLA-A*02:03 |
| 5996 | WT1 | ENSG00000184937 | QQYSVPPPV | 2636 | HLA-A*02:07 |
| 5997 | WT1 | ENSG00000184937 | QQYSVPPPV | 2636 | HLA-A*30:01 |
| 5998 | WT1 | ENSG00000184937 | QQYSVPPPV | 2636 | HLA-A*32:01 |
| 5999 | WT1 | ENSG00000184937 | QQYSVPPPV | 2636 | HLA-B*13:02 |
| 6000 | WT1 | ENSG00000184937 | QQYSVPPPV | 2636 | HLA-B*37:01 |
| 6001 | WT1 | ENSG00000184937 | QQYSVPPPV | 2636 | HLA-B*49:01 |
| 6002 | WT1 | ENSG00000184937 | QQYSVPPPV | 2636 | HLA-B*55:01 |
| 6003 | WT1 | ENSG00000184937 | QQYSVPPPV | 2636 | HLA-B*56:01 |
| 6004 | WT1 | ENSG00000184937 | QQYSVPPPV | 2636 | HLA-C*02:02 |
| 6005 | WT1 | ENSG00000184937 | QQYSVPPPV | 2636 | HLA-C*06:02 |
| 6006 | WT1 | ENSG00000184937 | QRNMTKLQL | 2637 | HLA-C*06:02 |
| 6007 | WT1 | ENSG00000184937 | QSNHSTGY | 2638 | HLA-A*30:02 |
| 6008 | WT1 | ENSG00000184937 | QSNHSTGY | 2638 | HLA-A*32:01 |
| 6009 | WT1 | ENSG00000184937 | QYSVPPPVY | 2639 | HLA-A*23:01 |
| 6010 | WT1 | ENSG00000184937 | QYSVPPPVY | 2639 | HLA-A*24:02 |
| 6011 | WT1 | ENSG00000184937 | QYSVPPPVY | 2639 | HLA-A*29:02 |
| 6012 | WT1 | ENSG00000184937 | QYSVPPPVY | 2639 | HLA-A*30:02 |
| 6013 | WT1 | ENSG00000184937 | QYSVPPPVY | 2639 | HLA-A*32:01 |
| 6014 | WT1 | ENSG00000184937 | QYSVPPPVY | 2639 | HLA-B*15:03 |
| 6015 | WT1 | ENSG00000184937 | QYSVPPPVY | 2639 | HLA-C*01:02 |
| 6016 | WT1 | ENSG00000184937 | QYSVPPPVY | 2639 | HLA-C*14:02 |
| 6017 | WT1 | ENSG00000184937 | QYSVPPPVY | 2639 | HLA-C*16:01 |
| 6018 | WT1 | ENSG00000184937 | RIHTHGVFR | 2640 | HLA-A*03:01 |
| 6019 | WT1 | ENSG00000184937 | RIHTHGVFR | 2640 | HLA-A*31:01 |
| 6020 | WT1 | ENSG00000184937 | RMFPNAPYL | 2641 | HLA-A*02:01 |
| 6021 | WT1 | ENSG00000184937 | RMFPNAPYL | 2641 | HLA-A*02:04 |
| 6022 | WT1 | ENSG00000184937 | RMFPNAPYL | 2641 | HLA-A*02:07 |
| 6023 | WT1 | ENSG00000184937 | RMFPNAPYL | 2641 | HLA-A*03:01 |
| 6024 | WT1 | ENSG00000184937 | RMFPNAPYL | 2641 | HLA-A*23:01 |
| 6025 | WT1 | ENSG00000184937 | RMFPNAPYL | 2641 | HLA-A*24:02 |
| 6026 | WT1 | ENSG00000184937 | RMFPNAPYL | 2641 | HLA-A*32:01 |
| 6027 | WT1 | ENSG00000184937 | RMFPNAPYL | 2641 | HLA-B*57:01 |
| 6028 | WT1 | ENSG00000184937 | RMFPNAPYL | 2641 | HLA-C*02:02 |
| 6029 | WT1 | ENSG00000184937 | RMFPNAPY | 2642 | HLA-A*30:02 |
| 6030 | WT1 | ENSG00000184937 | RNMTKLQL | 2643 | HLA-B*08:01 |
| 6031 | WT1 | ENSG00000184937 | RRVPGVAPTL | 2644 | HLA-B*27:05 |
| 6032 | WT1 | ENSG00000184937 | RRVPGVAPTL | 2644 | HLA-C*16:04 |
| 6033 | WT1 | ENSG00000184937 | RTPYSSDNLY | 2645 | HLA-A*01:01 |
| 6034 | WT1 | ENSG00000184937 | RTPYSSDNL | 2646 | HLA-C*01:02 |
| 6035 | WT1 | ENSG00000184937 | RVPGVAPTLVR | 2647 | HLA-A*03:01 |
| 6036 | WT1 | ENSG00000184937 | RVPGVAPTLVR | 2647 | HLA-A*31:01 |
| 6037 | WT1 | ENSG00000184937 | RVPGVAPTLV | 2648 | HLA-A*02:01 |
| 6038 | WT1 | ENSG00000184937 | RVPGVAPTLV | 2648 | HLA-A*02:03 |
| 6039 | WT1 | ENSG00000184937 | RVPGVAPTLV | 2648 | HLA-A*02:07 |
| 6040 | WT1 | ENSG00000184937 | RVPGVAPTL | 2649 | HLA-A*02:04 |
| 6041 | WT1 | ENSG00000184937 | RVPGVAPTL | 2649 | HLA-A*02:07 |
| 6042 | WT1 | ENSG00000184937 | RVPGVAPTL | 2649 | HLA-A*23:01 |
| 6043 | WT1 | ENSG00000184937 | RVPGVAPTL | 2649 | HLA-A*24:02 |
| 6044 | WT1 | ENSG00000184937 | RVPGVAPTL | 2649 | HLA-A*25:01 |
| 6045 | WT1 | ENSG00000184937 | RVPGVAPTL | 2649 | HLA-A*32:01 |
| 6046 | WT1 | ENSG00000184937 | RVPGVAPTL | 2649 | HLA-B*07:02 |
| 6047 | WT1 | ENSG00000184937 | RVPGVAPTL | 2649 | HLA-B*13:02 |
| 6048 | WT1 | ENSG00000184937 | RVPGVAPTL | 2649 | HLA-B*58:01 |
| 6049 | WT1 | ENSG00000184937 | RVPGVAPTL | 2649 | HLA-C*01:02 |
| 6050 | WT1 | ENSG00000184937 | RVPGVAPTL | 2649 | HLA-C*03:04 |
| 6051 | WT1 | ENSG00000184937 | RYFKLSHLQM | 2650 | HLA-A*24:02 |
| 6052 | WT1 | ENSG00000184937 | SASETSEKRPF | 2651 | HLA-C*16:01 |
| 6053 | WT1 | ENSG00000184937 | SASETSEKR | 2652 | HLA-A*68:01 |
| 6054 | WT1 | ENSG00000184937 | SASETSEKR | 2652 | HLA-C*07:06 |
| 6055 | WT1 | ENSG00000184937 | SDELVRHHNM | 2653 | HLA-B*37:01 |
| 6056 | WT1 | ENSG00000184937 | SDNHTTPIL | 2654 | HLA-B*37:01 |
| 6057 | WT1 | ENSG00000184937 | SDNHTTPI | 2655 | HLA-B*37:01 |
| 6058 | WT1 | ENSG00000184937 | SDVRDLNAL | 2656 | HLA-A*30:01 |
| 6059 | WT1 | ENSG00000184937 | SDVRDLNAL | 2656 | HLA-B*37:01 |
| 6060 | WT1 | ENSG00000184937 | SDVRDLNAL | 2656 | HLA-B*40:01 |
| 6061 | WT1 | ENSG00000184937 | SDVRDLNAL | 2656 | HLA-B*40:02 |
| 6062 | WT1 | ENSG00000184937 | SEKPFSCRW | 2657 | HLA-B*44:02 |
| 6063 | WT1 | ENSG00000184937 | SEKPFSCRW | 2657 | HLA-B*44:03 |
| 6064 | WT1 | ENSG00000184937 | SETSEKRPF | 2658 | HLA-B*37:01 |
| 6065 | WT1 | ENSG00000184937 | SETSEKRPF | 2658 | HLA-B*44:02 |
| 6066 | WT1 | ENSG00000184937 | SETSEKRPF | 2658 | HLA-B*44:03 |
| 6067 | WT1 | ENSG00000184937 | SETSEKRPF | 2658 | HLA-C*16:01 |
| 6068 | WT1 | ENSG00000184937 | SFIKQEPSW | 2659 | HLA-A*23:01 |
| 6069 | WT1 | ENSG00000184937 | SFIKQEPSW | 2659 | HLA-A*24:02 |
| 6070 | WT1 | ENSG00000184937 | SGQFTGTAGAC | 2660 | HLA-C*06:02 |
| 6071 | WT1 | ENSG00000184937 | SGQFTGTAGAC | 2660 | HLA-C*12:03 |
| 6072 | WT1 | ENSG00000184937 | SLGEQQYSV | 2661 | HLA-A*02:01 |
| 6073 | WT1 | ENSG00000184937 | SLGEQQYSV | 2661 | HLA-A*02:03 |
| 6074 | WT1 | ENSG00000184937 | SLGEQQYSV | 2661 | HLA-A*02:04 |
| 6075 | WT1 | ENSG00000184937 | SLGEQQYSV | 2661 | HLA-B*13:02 |
| 6076 | WT1 | ENSG00000184937 | SLGEQQYSV | 2661 | HLA-B*55:01 |
| 6077 | WT1 | ENSG00000184937 | SLGGPAPPP | 2662 | HLA-A*03:02 |
| 6078 | WT1 | ENSG00000184937 | SLGGPAPPP | 2662 | HLA-C*06:02 |
| 6079 | WT1 | ENSG00000184937 | SQALLLRTPY | 2663 | HLA-A*30:02 |
| 6080 | WT1 | ENSG00000184937 | SQALLLRTPY | 2663 | HLA-A*32:01 |
| 6081 | WT1 | ENSG00000184937 | SQALLLRTPY | 2663 | HLA-B*15:01 |
| 6082 | WT1 | ENSG00000184937 | SQALLLRTPY | 2663 | HLA-B*15:03 |
| 6083 | WT1 | ENSG00000184937 | SQALLLRTPY | 2663 | HLA-C*02:02 |
| 6084 | WT1 | ENSG00000184937 | SQALLLRTPY | 2663 | HLA-C*07:04 |
| 6085 | WT1 | ENSG00000184937 | SQPAIRNQGY | 2664 | HLA-A*26:01 |
| 6086 | WT1 | ENSG00000184937 | SQPAIRNQGY | 2664 | HLA-A*30:02 |
| 6087 | WT1 | ENSG00000184937 | SQPAIRNQGY | 2664 | HLA-A*32:01 |
| 6088 | WT1 | ENSG00000184937 | SQPAIRNQGY | 2664 | HLA-B*15:01 |
| 6089 | WT1 | ENSG00000184937 | SQPAIRNQGY | 2664 | HLA-B*15:03 |
| 6090 | WT1 | ENSG00000184937 | SQPAIRNQGY | 2664 | HLA-C*07:04 |
| 6091 | WT1 | ENSG00000184937 | SSDNLYQM | 2665 | HLA-C*05:01 |
| 6092 | WT1 | ENSG00000184937 | SSGQARMF | 2666 | HLA-C*16:01 |
| 6093 | WT1 | ENSG00000184937 | STVTFDGTPSY | 2667 | HLA-A*01:01 |
| 6094 | WT1 | ENSG00000184937 | STVTFDGTPSY | 2667 | HLA-A*25:01 |
| 6095 | WT1 | ENSG00000184937 | STVTFDGTPSY | 2667 | HLA-A*26:01 |
| 6096 | WT1 | ENSG00000184937 | STVTFDGTPSY | 2667 | HLA-A*29:02 |
| 6097 | WT1 | ENSG00000184937 | STVTFDGTPSY | 2667 | HLA-A*30:02 |
| 6098 | WT1 | ENSG00000184937 | STVTFDGTPSY | 2667 | HLA-B*46:01 |
| 6099 | WT1 | ENSG00000184937 | STVTFDGTPSY | 2667 | HLA-B*57:01 |
| 6100 | WT1 | ENSG00000184937 | STVTFDGTPSY | 2667 | HLA-B*58:01 |
| 6101 | WT1 | ENSG00000184937 | SVPPPVYGC | 2668 | HLA-A*02:01 |
| 6102 | WT1 | ENSG00000184937 | SVPPPVYGC | 2668 | HLA-A*02:07 |
| 6103 | WT1 | ENSG00000184937 | TEGQSNHSTGY | 2669 | HLA-B*27:02 |
| 6104 | WT1 | ENSG00000184937 | TEGQSNHSTGY | 2669 | HLA-B*44:02 |
| 6105 | WT1 | ENSG00000184937 | TEGQSNHSTGY | 2669 | HLA-B*44:03 |
| 6106 | WT1 | ENSG00000184937 | TEGQSNHSTGY | 2669 | HLA-C*04:01 |
| 6107 | WT1 | ENSG00000184937 | TEGQSNHSTGY | 2669 | HLA-C*16:04 |
| 6108 | WT1 | ENSG00000184937 | TFDGTPSYG | 2670 | HLA-C*04:01 |
| 6109 | WT1 | ENSG00000184937 | TFDGTPSY | 2671 | HLA-A*32:01 |
| 6110 | WT1 | ENSG00000184937 | TFDGTPSY | 2671 | HLA-B*18:01 |
| 6111 | WT1 | ENSG00000184937 | TFDGTPSY | 2671 | HLA-C*04:01 |
| 6112 | WT1 | ENSG00000184937 | TFDGTPSY | 2671 | HLA-C*14:02 |
| 6113 | WT1 | ENSG00000184937 | TGKTSEKPF | 2672 | HLA-C*16:01 |
| 6114 | WT1 | ENSG00000184937 | TGSQALLLR | 2673 | HLA-A*68:01 |
| 6115 | WT1 | ENSG00000184937 | TGSQALLLR | 2673 | HLA-C*07:06 |
| 6116 | WT1 | ENSG00000184937 | TGTAGACRY | 2674 | HLA-B*39:01 |
| 6117 | WT1 | ENSG00000184937 | TGTAGACRY | 2674 | HLA-C*16:01 |
| 6118 | WT1 | ENSG00000184937 | TGTAGACRY | 2674 | HLA-C*16:02 |
| 6119 | WT1 | ENSG00000184937 | TPILCGAQY | 2675 | HLA-B*35:01 |
| 6120 | WT1 | ENSG00000184937 | TPILCGAQY | 2675 | HLA-B*55:01 |
| 6121 | WT1 | ENSG00000184937 | TPSHHAAQF | 2676 | HLA-B*07:02 |
| 6122 | WT1 | ENSG00000184937 | TPSHHAAQF | 2676 | HLA-B*35:01 |
| 6123 | WT1 | ENSG00000184937 | TPSHHAAQF | 2676 | HLA-B*35:03 |
| 6124 | WT1 | ENSG00000184937 | TPYSSDNLYQM | 2677 | HLA-B*35:01 |
| 6125 | WT1 | ENSG00000184937 | TPYSSDNLYQM | 2677 | HLA-B*35:03 |
| 6126 | WT1 | ENSG00000184937 | TPYSSDNLYQM | 2677 | HLA-B*55:01 |
| 6127 | WT1 | ENSG00000184937 | TPYSSDNLYQM | 2677 | HLA-B*56:01 |
| 6128 | WT1 | ENSG00000184937 | TPYSSDNLY | 2678 | HLA-A*26:01 |
| 6129 | WT1 | ENSG00000184937 | TPYSSDNLY | 2678 | HLA-B*15:01 |
| 6130 | WT1 | ENSG00000184937 | TPYSSDNLY | 2678 | HLA-B*15:03 |
| 6131 | WT1 | ENSG00000184937 | TPYSSDNLY | 2678 | HLA-B*35:01 |
| 6132 | WT1 | ENSG00000184937 | TPYSSDNLY | 2678 | HLA-B*35:03 |
| 6133 | WT1 | ENSG00000184937 | TPYSSDNLY | 2678 | HLA-B*55:01 |
| 6134 | WT1 | ENSG00000184937 | TPYSSDNLY | 2678 | HLA-C*03:03 |
| 6135 | WT1 | ENSG00000184937 | TPYSSDNLY | 2678 | HLA-C*07:04 |
| 6136 | WT1 | ENSG00000184937 | TPYSSDNL | 2679 | HLA-B*07:02 |
| 6137 | WT1 | ENSG00000184937 | TPYSSDNL | 2679 | HLA-B*35:03 |
| 6138 | WT1 | ENSG00000184937 | TPYSSDNL | 2679 | HLA-B*39:01 |
| 6139 | WT1 | ENSG00000184937 | TPYSSDNL | 2679 | HLA-B*51:01 |
| 6140 | WT1 | ENSG00000184937 | TPYSSDNL | 2679 | HLA-C*07:02 |
| 6141 | WT1 | ENSG00000184937 | TSQLECMTW | 2680 | HLA-B*57:01 |
| 6142 | WT1 | ENSG00000184937 | TSQLECMTW | 2680 | HLA-B*58:01 |
| 6143 | WT1 | ENSG00000184937 | TTPILCGAQY | 2681 | HLA-A*26:01 |
| 6144 | WT1 | ENSG00000184937 | TVTFDGTPSY | 2682 | HLA-A*01:01 |
| 6145 | WT1 | ENSG00000184937 | TVTFDGTPSY | 2682 | HLA-A*25:01 |
| 6146 | WT1 | ENSG00000184937 | TVTFDGTPSY | 2682 | HLA-A*26:01 |
| 6147 | WT1 | ENSG00000184937 | TVTFDGTPSY | 2682 | HLA-A*30:02 |
| 6148 | WT1 | ENSG00000184937 | TVTFDGTPSY | 2682 | HLA-B*15:01 |
| 6149 | WT1 | ENSG00000184937 | TVTFDGTPSY | 2682 | HLA-B*39:01 |
| 6150 | WT1 | ENSG00000184937 | VAAGSSSSVKW | 2683 | HLA-A*25:01 |
| 6151 | WT1 | ENSG00000184937 | VAAGSSSSVKW | 2683 | HLA-A*32:01 |
| 6152 | WT1 | ENSG00000184937 | VAAGSSSSVKW | 2683 | HLA-A*33:01 |
| 6153 | WT1 | ENSG00000184937 | VAAGSSSSVKW | 2683 | HLA-B*57:01 |
| 6154 | WT1 | ENSG00000184937 | VAAGSSSSVKW | 2683 | HLA-B*58:01 |
| 6155 | WT1 | ENSG00000184937 | VAAGSSSSVKW | 2683 | HLA-C*02:02 |
| 6156 | WT1 | ENSG00000184937 | VAAGSSSSVKW | 2683 | HLA-C*16:02 |
| 6157 | WT1 | ENSG00000184937 | VAAGSSSSVKW | 2683 | HLA-C*16:04 |
| 6158 | WT1 | ENSG00000184937 | VAAGSSSSVK | 2684 | HLA-A*03:02 |
| 6159 | WT1 | ENSG00000184937 | VAAGSSSSV | 2685 | HLA-A*02:03 |
| 6160 | WT1 | ENSG00000184937 | VAAGSSSSV | 2685 | HLA-B*13:02 |
| 6161 | WT1 | ENSG00000184937 | VAAGSSSSV | 2685 | HLA-B*15:03 |
| 6162 | WT1 | ENSG00000184937 | VAAGSSSSV | 2685 | HLA-B*39:01 |
| 6163 | WT1 | ENSG00000184937 | VAAGSSSSV | 2685 | HLA-B*46:01 |
| 6164 | WT1 | ENSG00000184937 | VAAGSSSSV | 2685 | HLA-B*51:01 |
| 6165 | WT1 | ENSG00000184937 | VAAGSSSSV | 2685 | HLA-B*56:01 |
| 6166 | WT1 | ENSG00000184937 | VAAGSSSSV | 2685 | HLA-C*01:02 |
| 6167 | WT1 | ENSG00000184937 | VAAGSSSSV | 2685 | HLA-C*02:02 |
| 6168 | WT1 | ENSG00000184937 | VAAGSSSSV | 2685 | HLA-C*03:03 |
| 6169 | WT1 | ENSG00000184937 | VAAGSSSSV | 2685 | HLA-C*03:04 |
| 6170 | WT1 | ENSG00000184937 | VAAGSSSSV | 2685 | HLA-C*05:01 |
| 6171 | WT1 | ENSG00000184937 | VAAGSSSSV | 2685 | HLA-C*12:03 |
| 6172 | WT1 | ENSG00000184937 | VAAGSSSSV | 2685 | HLA-C*14:02 |
| 6173 | WT1 | ENSG00000184937 | VAAGSSSSV | 2685 | HLA-C*16:02 |
| 6174 | WT1 | ENSG00000184937 | VAAGSSSSV | 2685 | HLA-C*16:04 |
| 6175 | WT1 | ENSG00000184937 | VAPTLVRSA | 2686 | HLA-B*46:01 |
| 6176 | WT1 | ENSG00000184937 | VAPTLVRSA | 2686 | HLA-C*01:02 |
| 6177 | WT1 | ENSG00000184937 | VAPTLVRSA | 2686 | HLA-C*16:01 |
| 6178 | WT1 | ENSG00000184937 | VLDFAPPGA | 2687 | HLA-A*02:01 |
| 6179 | WT1 | ENSG00000184937 | VLDFAPPGA | 2687 | HLA-A*02:07 |
| 6180 | WT1 | ENSG00000184937 | VPGVAPTLV | 2688 | HLA-B*51:01 |
| 6181 | WT1 | ENSG00000184937 | VPGVAPTLV | 2688 | HLA-B*56:01 |
| 6182 | WT1 | ENSG00000184937 | VPGVAPTLV | 2688 | HLA-C*04:01 |
| 6183 | WT1 | ENSG00000184937 | VPGVAPTL | 2689 | HLA-A*23:01 |
| 6184 | WT1 | ENSG00000184937 | VPGVAPTL | 2689 | HLA-B*07:02 |
| 6185 | WT1 | ENSG00000184937 | VPGVAPTL | 2689 | HLA-B*08:01 |
| 6186 | WT1 | ENSG00000184937 | VPGVAPTL | 2689 | HLA-B*35:01 |
| 6187 | WT1 | ENSG00000184937 | VPGVAPTL | 2689 | HLA-B*35:03 |
| 6188 | WT1 | ENSG00000184937 | VPGVAPTL | 2689 | HLA-B*51:01 |
| 6189 | WT1 | ENSG00000184937 | VPGVAPTL | 2689 | HLA-B*55:01 |
| 6190 | WT1 | ENSG00000184937 | VPGVAPTL | 2689 | HLA-B*56:01 |
| 6191 | WT1 | ENSG00000184937 | VPGVAPTL | 2689 | HLA-C*05:01 |
| 6192 | WT1 | ENSG00000184937 | VPGVAPTL | 2689 | HLA-C*07:02 |
| 6193 | WT1 | ENSG00000184937 | VPGVAPTL | 2689 | HLA-C*14:02 |
| 6194 | WT1 | ENSG00000184937 | VPPPVYGC | 2690 | HLA-B*51:01 |
| 6195 | WT1 | ENSG00000184937 | VTFDGTPSYG | 2691 | HLA-C*12:03 |
| 6196 | WT1 | ENSG00000184937 | VTFDGTPSY | 2692 | HLA-A*01:01 |
| 6197 | WT1 | ENSG00000184937 | VTFDGTPSY | 2692 | HLA-A*03:01 |
| 6198 | WT1 | ENSG00000184937 | VTFDGTPSY | 2692 | HLA-A*03:02 |
| 6199 | WT1 | ENSG00000184937 | VTFDGTPSY | 2692 | HLA-A*11:01 |
| 6200 | WT1 | ENSG00000184937 | VTFDGTPSY | 2692 | HLA-A*23:01 |
| 6201 | WT1 | ENSG00000184937 | VTFDGTPSY | 2692 | HLA-A*25:01 |
| 6202 | WT1 | ENSG00000184937 | VTFDGTPSY | 2692 | HLA-A*26:01 |
| 6203 | WT1 | ENSG00000184937 | VTFDGTPSY | 2692 | HLA-A*29:02 |
| 6204 | WT1 | ENSG00000184937 | VTFDGTPSY | 2692 | HLA-A*30:02 |
| 6205 | WT1 | ENSG00000184937 | VTFDGTPSY | 2692 | HLA-A*32:01 |
| 6206 | WT1 | ENSG00000184937 | VTFDGTPSY | 2692 | HLA-B*13:02 |
| 6207 | WT1 | ENSG00000184937 | VTFDGTPSY | 2692 | HLA-B*15:01 |
| 6208 | WT1 | ENSG00000184937 | VTFDGTPSY | 2692 | HLA-B*15:03 |
| 6209 | WT1 | ENSG00000184937 | VTFDGTPSY | 2692 | HLA-B*18:01 |
| 6210 | WT1 | ENSG00000184937 | VTFDGTPSY | 2692 | HLA-B*27:02 |
| 6211 | WT1 | ENSG00000184937 | VTFDGTPSY | 2692 | HLA-B*27:05 |
| 6212 | WT1 | ENSG00000184937 | VTFDGTPSY | 2692 | HLA-B*35:01 |
| 6213 | WT1 | ENSG00000184937 | VTFDGTPSY | 2692 | HLA-B*39:01 |
| 6214 | WT1 | ENSG00000184937 | VTFDGTPSY | 2692 | HLA-B*44:03 |
| 6215 | WT1 | ENSG00000184937 | VTFDGTPSY | 2692 | HLA-B*46:01 |
| 6216 | WT1 | ENSG00000184937 | VTFDGTPSY | 2692 | HLA-B*57:01 |
| 6217 | WT1 | ENSG00000184937 | VTFDGTPSY | 2692 | HLA-B*58:01 |
| 6218 | WT1 | ENSG00000184937 | VTFDGTPSY | 2692 | HLA-C*01:02 |
| 6219 | WT1 | ENSG00000184937 | VTFDGTPSY | 2692 | HLA-C*02:02 |
| 6220 | WT1 | ENSG00000184937 | VTFDGTPSY | 2692 | HLA-C*03:03 |
| 6221 | WT1 | ENSG00000184937 | VTFDGTPSY | 2692 | HLA-C*03:04 |
| 6222 | WT1 | ENSG00000184937 | VTFDGTPSY | 2692 | HLA-C*05:01 |
| 6223 | WT1 | ENSG00000184937 | VTFDGTPSY | 2692 | HLA-C*07:04 |
| 6224 | WT1 | ENSG00000184937 | VTFDGTPSY | 2692 | HLA-C*07:06 |
| 6225 | WT1 | ENSG00000184937 | VTFDGTPSY | 2692 | HLA-C*12:03 |
| 6226 | WT1 | ENSG00000184937 | VTFDGTPSY | 2692 | HLA-C*14:02 |
| 6227 | WT1 | ENSG00000184937 | VTFDGTPSY | 2692 | HLA-C*16:01 |
| 6228 | WT1 | ENSG00000184937 | VTFDGTPSY | 2692 | HLA-C*16:02 |
| 6229 | WT1 | ENSG00000184937 | VTFDGTPSY | 2692 | HLA-C*16:04 |
| 6230 | WT1 | ENSG00000184937 | YESDNHTTPIL | 2693 | HLA-A*30:01 |
| 6231 | WT1 | ENSG00000184937 | YESDNHTTPIL | 2693 | HLA-B*40:01 |
| 6232 | WT1 | ENSG00000184937 | YESDNHTTPIL | 2693 | HLA-B*40:02 |
| 6233 | WT1 | ENSG00000184937 | YESDNHTTPIL | 2693 | HLA-C*16:04 |
| 6234 | WT1 | ENSG00000184937 | YESDNHTTPI | 2694 | HLA-B*40:01 |
| 6235 | WT1 | ENSG00000184937 | YESDNHTTPI | 2694 | HLA-B*49:01 |
| 6236 | WT1 | ENSG00000184937 | YESDNHTTP | 2695 | HLA-B*49:01 |
| 6237 | WT1 | ENSG00000184937 | YESDNHTTP | 2695 | HLA-C*16:04 |
| 6238 | WT1 | ENSG00000184937 | YGPFGPPPPS | 2696 | HLA-C*04:01 |
| 6239 | WT1 | ENSG00000184937 | YGPFGPPPPS | 2696 | HLA-C*06:02 |
| 6240 | WT1 | ENSG00000184937 | YGPFGPPPPS | 2696 | HLA-C*07:02 |
| 6241 | WT1 | ENSG00000184937 | YGPFGPPPP | 2697 | HLA-B*54:01 |
| 6242 | WT1 | ENSG00000184937 | YGPFGPPPP | 2697 | HLA-C*04:01 |
| 6243 | WT1 | ENSG00000184937 | YQMTSQLECM | 2698 | HLA-C*07:04 |
| 6244 | WT1 | ENSG00000184937 | YQMTSQLEC | 2699 | HLA-B*13:02 |
| 6245 | WT1 | ENSG00000184937 | YQMTSQLEC | 2699 | HLA-B*15:01 |
| 6246 | WT1 | ENSG00000184937 | YQMTSQLEC | 2699 | HLA-B*39:01 |
| 6247 | WT1 | ENSG00000184937 | YQMTSQLEC | 2699 | HLA-C*03:03 |
| 6248 | WT1 | ENSG00000184937 | YQMTSQLEC | 2699 | HLA-C*03:04 |
| 6249 | WT1 | ENSG00000184937 | YQMTSQLEC | 2699 | HLA-C*16:02 |
| 6250 | WT1 | ENSG00000184937 | YSSDNLYQM | 2700 | HLA-A*01:01 |
| 6251 | WT1 | ENSG00000184937 | YSSDNLYQM | 2700 | HLA-A*02:01 |
| 6252 | WT1 | ENSG00000184937 | YSSDNLYQM | 2700 | HLA-A*26:01 |
| 6253 | WT1 | ENSG00000184937 | YSSDNLYQM | 2700 | HLA-A*68:02 |
| 6254 | WT1 | ENSG00000184937 | YSSDNLYQM | 2700 | HLA-B*35:01 |
| 6255 | WT1 | ENSG00000184937 | YSSDNLYQM | 2700 | HLA-B*35:03 |
| 6256 | WT1 | ENSG00000184937 | YSSDNLYQM | 2700 | HLA-B*39:01 |
| 6257 | WT1 | ENSG00000184937 | YSSDNLYQM | 2700 | HLA-B*46:01 |
| 6258 | WT1 | ENSG00000184937 | YSSDNLYQM | 2700 | HLA-B*58:01 |
| 6259 | WT1 | ENSG00000184937 | YSSDNLYQM | 2700 | HLA-C*02:02 |
| 6260 | WT1 | ENSG00000184937 | YSSDNLYQM | 2700 | HLA-C*03:03 |
| 6261 | WT1 | ENSG00000184937 | YSSDNLYQM | 2700 | HLA-C*03:04 |
| 6262 | WT1 | ENSG00000184937 | YSSDNLYQM | 2700 | HLA-C*07:04 |
| 6263 | WT1 | ENSG00000184937 | YSSDNLYQM | 2700 | HLA-C*12:03 |
| 6264 | WT1 | ENSG00000184937 | YSSDNLYQM | 2700 | HLA-C*16:02 |
| 6265 | WT1 | ENSG00000184937 | YSVPPPVY | 2701 | HLA-A*01:01 |
| 6266 | WT1 | ENSG00000184937 | YSVPPPVY | 2701 | HLA-B*15:01 |
| 6267 | WT1 | ENSG00000184937 | YSVPPPVY | 2701 | HLA-B*15:03 |
| 6268 | WT1 | ENSG00000184937 | YSVPPPVY | 2701 | HLA-B*18:01 |
| 6269 | WT1 | ENSG00000184937 | YSVPPPVY | 2701 | HLA-B*39:01 |
| 6270 | WT1 | ENSG00000184937 | YSVPPPVY | 2701 | HLA-B*46:01 |
| 6271 | WT1 | ENSG00000184937 | YSVPPPVY | 2701 | HLA-B*57:01 |
| 6272 | WT1 | ENSG00000184937 | YSVPPPVY | 2701 | HLA-B*58:01 |
| 6273 | WT1 | ENSG00000184937 | YSVPPPVY | 2701 | HLA-C*02:02 |
| 6274 | WT1 | ENSG00000184937 | YSVPPPVY | 2701 | HLA-C*03:04 |
| 6275 | WT1 | ENSG00000184937 | YSVPPPVY | 2701 | HLA-C*12:03 |
| 6276 | WT1 | ENSG00000184937 | YSVPPPVY | 2701 | HLA-C*16:01 |
| 6277 | WT1 | ENSG00000184937 | YSVPPPVY | 2701 | HLA-C*16:02 |
| 6278 | KKLC-1 | ENSG00000204019 | ALALVRPSSS | 2702 | HLA-A*02:03 |
| 6279 | KKLC-1 | ENSG00000204019 | ALALVRPSS | 2703 | HLA-A*32:01 |
| 6280 | KKLC-1 | ENSG00000204019 | ALALVRPSS | 2703 | HLA-C*16:01 |
| 6281 | KKLC-1 | ENSG00000204019 | ALIVFWKY | 2704 | HLA-A*29:02 |
| 6282 | KKLC-1 | ENSG00000204019 | ALVRPSSSGL | 2705 | HLA-A*02:03 |
| 6283 | KKLC-1 | ENSG00000204019 | AVYDLSRDIL | 2706 | HLA-A*25:01 |
| 6284 | KKLC-1 | ENSG00000204019 | AVYDLSRDIL | 2706 | HLA-B*07:02 |
| 6285 | KKLC-1 | ENSG00000204019 | AVYDLSRDIL | 2706 | HLA-C*12:03 |
| 6286 | KKLC-1 | ENSG00000204019 | AVYDLSRDI | 2707 | HLA-B*13:02 |
| 6287 | KKLC-1 | ENSG00000204019 | CALIVFWKY | 2708 | HLA-A*29:02 |
| 6288 | KKLC-1 | ENSG00000204019 | CALIVFWKY | 2708 | HLA-B*57:01 |
| 6289 | KKLC-1 | ENSG00000204019 | DLSRDILNNF | 2709 | HLA-A*25:01 |
| 6290 | KKLC-1 | ENSG00000204019 | DNNLAVYDLSR | 2710 | HLA-A*33:01 |
| 6291 | KKLC-1 | ENSG00000204019 | DNNLAVYDLSR | 2710 | HLA-B*27:02 |
| 6292 | KKLC-1 | ENSG00000204019 | EHTLLSKGF | 2711 | HLA-B*38:01 |
| 6293 | KKLC-1 | ENSG00000204019 | EHTLLSKGF | 2711 | HLA-B*44:02 |
| 6294 | KKLC-1 | ENSG00000204019 | EHTLLSKGF | 2711 | HLA-C*07:01 |
| 6295 | KKLC-1 | ENSG00000204019 | ELEHTLLSKGF | 2712 | HLA-C*07:01 |
| 6296 | KKLC-1 | ENSG00000204019 | ELEHTLLSK | 2713 | HLA-A*01:01 |
| 6297 | KKLC-1 | ENSG00000204019 | ELEHTLLSK | 2713 | HLA-A*33:01 |
| 6298 | KKLC-1 | ENSG00000204019 | EMSSNSTAL | 2714 | HLA-A*02:03 |
| 6299 | KKLC-1 | ENSG00000204019 | EMSSNSTAL | 2714 | HLA-A*25:01 |
| 6300 | KKLC-1 | ENSG00000204019 | EMSSNSTAL | 2714 | HLA-A*26:01 |
| 6301 | KKLC-1 | ENSG00000204019 | EMSSNSTAL | 2714 | HLA-A*32:01 |
| 6302 | KKLC-1 | ENSG00000204019 | EMSSNSTAL | 2714 | HLA-A*33:03 |
| 6303 | KKLC-1 | ENSG00000204019 | EMSSNSTAL | 2714 | HLA-B*07:02 |
| 6304 | KKLC-1 | ENSG00000204019 | EMSSNSTAL | 2714 | HLA-B*08:01 |
| 6305 | KKLC-1 | ENSG00000204019 | EMSSNSTAL | 2714 | HLA-B*27:05 |
| 6306 | KKLC-1 | ENSG00000204019 | EMSSNSTAL | 2714 | HLA-B*35:03 |
| 6307 | KKLC-1 | ENSG00000204019 | EMSSNSTAL | 2714 | HLA-B*38:01 |
| 6308 | KKLC-1 | ENSG00000204019 | EMSSNSTAL | 2714 | HLA-B*39:01 |
| 6309 | KKLC-1 | ENSG00000204019 | EMSSNSTAL | 2714 | HLA-B*55:01 |
| 6310 | KKLC-1 | ENSG00000204019 | EMSSNSTAL | 2714 | HLA-C*01:02 |
| 6311 | KKLC-1 | ENSG00000204019 | EMSSNSTAL | 2714 | HLA-C*07:02 |
| 6312 | KKLC-1 | ENSG00000204019 | EMSSNSTAL | 2714 | HLA-C*07:04 |
| 6313 | KKLC-1 | ENSG00000204019 | EMSSNSTAL | 2714 | HLA-C*I4:02 |
| 6314 | KKLC-1 | ENSG00000204019 | FPHSIARQK | 2715 | HLA-B*54:01 |
| 6315 | KKLC-1 | ENSG00000204019 | FQRNTGEM | 2716 | HLA-B*07:02 |
| 6316 | KKLC-1 | ENSG00000204019 | FQRNTGEM | 2716 | HLA-B*15:01 |
| 6317 | KKLC-1 | ENSG00000204019 | FQRNTGEM | 2716 | HLA-B*15:03 |
| 6318 | KKLC-1 | ENSG00000204019 | FQRNTGEM | 2716 | HLA-B*40:02 |
| 6319 | KKLC-1 | ENSG00000204019 | FQRNTGEM | 2716 | HLA-B*46:01 |
| 6320 | KKLC-1 | ENSG00000204019 | FQRNTGEM | 2716 | HLA-C*03:03 |
| 6321 | KKLC-1 | ENSG00000204019 | FQRNTGEM | 2716 | HLA-C*03:04 |
| 6322 | KKLC-1 | ENSG00000204019 | FQRNTGEM | 2716 | HLA-C*05:01 |
| 6323 | KKLC-1 | ENSG00000204019 | FQRNTGEM | 2716 | HLA-C*07:04 |
| 6324 | KKLC-1 | ENSG00000204019 | FQRNTGEM | 2716 | HLA-C*12:03 |
| 6325 | KKLC-1 | ENSG00000204019 | FQRNTGEM | 2716 | HLA-C*14:02 |
| 6326 | KKLC-1 | ENSG00000204019 | FQRNTGEM | 2716 | HLA-C*16:01 |
| 6327 | KKLC-1 | ENSG00000204019 | FYLLLASSIL | 2717 | HLA-A*24:02 |
| 6328 | KKLC-1 | ENSG00000204019 | FYLLLASSI | 2718 | HLA-A*23:01 |
| 6329 | KKLC-1 | ENSG00000204019 | FYLLLASSI | 2718 | HLA-A*24:02 |
| 6330 | KKLC-1 | ENSG00000204019 | FYLLLASSI | 2718 | HLA-C*14:02 |
| 6331 | KKLC-1 | ENSG00000204019 | GASPHRKST | 2719 | HLA-C*16:02 |
| 6332 | KKLC-1 | ENSG00000204019 | GEMSSNSTALA | 2720 | HLA-A*30:01 |
| 6333 | KKLC-1 | ENSG00000204019 | GEMSSNSTALA | 2720 | HLA-B*40:01 |
| 6334 | KKLC-1 | ENSG00000204019 | GEMSSNSTALA | 2720 | HLA-B*49:01 |
| 6335 | KKLC-1 | ENSG00000204019 | GEMSSNSTAL | 2721 | HLA-A*30:01 |
| 6336 | KKLC-1 | ENSG00000204019 | GEMSSNSTAL | 2721 | HLA-B*15:01 |
| 6337 | KKLC-1 | ENSG00000204019 | GEMSSNSTAL | 2721 | HLA-B*15:03 |
| 6338 | KKLC-1 | ENSG00000204019 | GEMSSNSTAL | 2721 | HLA-B*27:02 |
| 6339 | KKLC-1 | ENSG00000204019 | GEMSSNSTAL | 2721 | HLA-B*27:05 |
| 6340 | KKLC-1 | ENSG00000204019 | GEMSSNSTAL | 2721 | HLA-B*38:01 |
| 6341 | KKLC-1 | ENSG00000204019 | GEMSSNSTAL | 2721 | HLA-B*39:01 |
| 6342 | KKLC-1 | ENSG00000204019 | GEMSSNSTAL | 2721 | HLA-B*40:01 |
| 6343 | KKLC-1 | ENSG00000204019 | GEMSSNSTAL | 2721 | HLA-B*40:02 |
| 6344 | KKLC-1 | ENSG00000204019 | GEMSSNSTAL | 2721 | HLA-B*44:02 |
| 6345 | KKLC-1 | ENSG00000204019 | GEMSSNSTAL | 2721 | HLA-B*44:03 |
| 6346 | KKLC-1 | ENSG00000204019 | GEMSSNSTAL | 2721 | HLA-B*49:01 |
| 6347 | KKLC-1 | ENSG00000204019 | GEMSSNSTAL | 2721 | HLA-C*16:04 |
| 6348 | KKLC-1 | ENSG00000204019 | GEMSSNSTA | 2722 | HLA-A*30:01 |
| 6349 | KKLC-1 | ENSG00000204019 | GEMSSNSTA | 2722 | HLA-B*40:01 |
| 6350 | KKLC-1 | ENSG00000204019 | GEMSSNSTA | 2722 | HLA-B*40:02 |
| 6351 | KKLC-1 | ENSG00000204019 | GEMSSNSTA | 2722 | HLA-B*49:01 |
| 6352 | KKLC-1 | ENSG00000204019 | GLINSNTDNNL | 2723 | HLA-A*02:01 |
| 6353 | KKLC-1 | ENSG00000204019 | GLINSNTDNNL | 2723 | HLA-A*02:04 |
| 6354 | KKLC-1 | ENSG00000204019 | GLINSNTDNNL | 2723 | HLA-B*27:05 |
| 6355 | KKLC-1 | ENSG00000204019 | HTLLSKGFR | 2724 | HLA-A*31:01 |
| 6356 | KKLC-1 | ENSG00000204019 | HTLLSKGFR | 2724 | HLA-A*33:01 |
| 6357 | KKLC-1 | ENSG00000204019 | HTLLSKGFR | 2724 | HLA-A*33:03 |
| 6358 | KKLC-1 | ENSG00000204019 | HTLLSKGF | 2725 | HLA-B*57:01 |
| 6359 | KKLC-1 | ENSG00000204019 | ILNNFPHSIAR | 2726 | HLA-A*03:01 |
| 6360 | KKLC-1 | ENSG00000204019 | ILNNFPHSIAR | 2726 | HLA-A*31:01 |
| 6361 | KKLC-1 | ENSG00000204019 | ILNNFPHSIAR | 2726 | HLA-A*33:01 |
| 6362 | KKLC-1 | ENSG00000204019 | ILNNFPHSIAR | 2726 | HLA-A*33:03 |
| 6363 | KKLC-1 | ENSG00000204019 | ILNNFPHSIA | 2727 | HLA-A*02:03 |
| 6364 | KKLC-1 | ENSG00000204019 | ILNNFPHSI | 2728 | HLA-A*02:01 |
| 6365 | KKLC-1 | ENSG00000204019 | ILNNFPHSI | 2728 | HLA-A*02:03 |
| 6366 | KKLC-1 | ENSG00000204019 | ILNNFPHSI | 2728 | HLA-A*02:04 |
| 6367 | KKLC-1 | ENSG00000204019 | ILNNFPHSI | 2728 | HLA-A*02:07 |
| 6368 | KKLC-1 | ENSG00000204019 | ILNNFPHSI | 2728 | HLA-A*23:01 |
| 6369 | KKLC-1 | ENSG00000204019 | ILNNFPHSI | 2728 | HLA-A*24:02 |
| 6370 | KKLC-1 | ENSG00000204019 | ILNNFPHSI | 2728 | HLA-A*30:01 |
| 6371 | KKLC-1 | ENSG00000204019 | ILNNFPHSI | 2728 | HLA-A*31:01 |
| 6372 | KKLC-1 | ENSG00000204019 | ILNNFPHSI | 2728 | HLA-A*32:01 |
| 6373 | KKLC-1 | ENSG00000204019 | ILNNFPHSI | 2728 | HLA-A*68:02 |
| 6374 | KKLC-1 | ENSG00000204019 | ILNNFPHSI | 2728 | HLA-B*13:02 |
| 6375 | KKLC-1 | ENSG00000204019 | ILNNFPHSI | 2728 | HLA-B*38:01 |
| 6376 | KKLC-1 | ENSG00000204019 | ILNNFPHSI | 2728 | HLA-B*51:01 |
| 6377 | KKLC-1 | ENSG00000204019 | ILNNFPHSI | 2728 | HLA-B*55:01 |
| 6378 | KKLC-1 | ENSG00000204019 | ILNNFPHSI | 2728 | HLA-C*01:02 |
| 6379 | KKLC-1 | ENSG00000204019 | ILNNFPHSI | 2728 | HLA-C*02:02 |
| 6380 | KKLC-1 | ENSG00000204019 | ILNNFPHSI | 2728 | HLA-C*06:02 |
| 6381 | KKLC-1 | ENSG00000204019 | ILNNFPHSI | 2728 | HLA-C*14:02 |
| 6382 | KKLC-1 | ENSG00000204019 | ILNNFPHSI | 2728 | HLA-C*16:01 |
| 6383 | KKLC-1 | ENSG00000204019 | ILNNFPHSI | 2728 | HLA-C*16:02 |
| 6384 | KKLC-1 | ENSG00000204019 | INSNTDNNL | 2729 | HLA-B*35:03 |
| 6385 | KKLC-1 | ENSG00000204019 | INSNTDNNL | 2729 | HLA-B*39:01 |
| 6386 | KKLC-1 | ENSG00000204019 | KLVELEHTLL | 2730 | HLA-A*02:01 |
| 6387 | KKLC-1 | ENSG00000204019 | KLVELEHTLL | 2730 | HLA-A*02:03 |
| 6388 | KKLC-1 | ENSG00000204019 | KLVELEHTLL | 2730 | HLA-A*02:04 |
| 6389 | KKLC-1 | ENSG00000204019 | KLVELEHTLL | 2730 | HLA-A*02:07 |
| 6390 | KKLC-1 | ENSG00000204019 | KLVELEHTL | 2731 | HLA-A*02:01 |
| 6391 | KKLC-1 | ENSG00000204019 | KLVELEHTL | 2731 | HLA-A*02:03 |
| 6392 | KKLC-1 | ENSG00000204019 | KLVELEHTL | 2731 | HLA-A*02:04 |
| 6393 | KKLC-1 | ENSG00000204019 | KLVELEHTL | 2731 | HLA-A*02:07 |
| 6394 | KKLC-1 | ENSG00000204019 | KLVELEHTL | 2731 | HLA-A*23:01 |
| 6395 | KKLC-1 | ENSG00000204019 | KLVELEHTL | 2731 | HLA-A*24:02 |
| 6396 | KKLC-1 | ENSG00000204019 | KLVELEHTL | 2731 | HLA-A*30:01 |
| 6397 | KKLC-1 | ENSG00000204019 | KLVELEHTL | 2731 | HLA-A*32:01 |
| 6398 | KKLC-1 | ENSG00000204019 | KLVELEHTL | 2731 | HLA-B*13:02 |
| 6399 | KKLC-1 | ENSG00000204019 | KLVELEHTL | 2731 | HLA-B*15:01 |
| 6400 | KKLC-1 | ENSG00000204019 | KLVELEHTL | 2731 | HLA-B*15:03 |
| 6401 | KKLC-1 | ENSG00000204019 | KLVELEHTL | 2731 | HLA-B*38:01 |
| 6402 | KKLC-1 | ENSG00000204019 | KLVELEHTL | 2731 | HLA-B*40:01 |
| 6403 | KKLC-1 | ENSG00000204019 | KLVELEHTL | 2731 | HLA-B*40:02 |
| 6404 | KKLC-1 | ENSG00000204019 | KLVELEHTL | 2731 | HLA-B*55:01 |
| 6405 | KKLC-1 | ENSG00000204019 | KLVELEHTL | 2731 | HLA-B*58:01 |
| 6406 | KKLC-1 | ENSG00000204019 | KLVELEHTL | 2731 | HLA-C*02:02 |
| 6407 | KKLC-1 | ENSG00000204019 | KLVELEHTL | 2731 | HLA-C*06:02 |
| 6408 | KKLC-1 | ENSG00000204019 | KLVELEHTL | 2731 | HLA-C*07:04 |
| 6409 | KKLC-1 | ENSG00000204019 | KLVELEHTL | 2731 | HLA-C*16:02 |
| 6410 | KKLC-1 | ENSG00000204019 | LASSILCAL | 2732 | HLA-A*68:02 |
| 6411 | KKLC-1 | ENSG00000204019 | LASSILCAL | 2732 | HLA-B*27:05 |
| 6412 | KKLC-1 | ENSG00000204019 | LASSILCAL | 2732 | HLA-B*35:03 |
| 6413 | KKLC-1 | ENSG00000204019 | LASSILCAL | 2732 | HLA-B*46:01 |
| 6414 | KKLC-1 | ENSG00000204019 | LASSILCAL | 2732 | HLA-C*02:02 |
| 6415 | KKLC-1 | ENSG00000204019 | LASSILCAL | 2732 | HLA-C*03:03 |
| 6416 | KKLC-1 | ENSG00000204019 | LASSILCAL | 2732 | HLA-C*03:04 |
| 6417 | KKLC-1 | ENSG00000204019 | LASSILCAL | 2732 | HLA-C*07:04 |
| 6418 | KKLC-1 | ENSG00000204019 | LASSILCAL | 2732 | HLA-C*12:03 |
| 6419 | KKLC-1 | ENSG00000204019 | LASSILCAL | 2732 | HLA-C*16:01 |
| 6420 | KKLC-1 | ENSG00000204019 | LASSILCAL | 2732 | HLA-C*16:02 |
| 6421 | KKLC-1 | ENSG00000204019 | LASSILCA | 2733 | HLA-B*54:01 |
| 6422 | KKLC-1 | ENSG00000204019 | LEHTLLSKGF | 2734 | HLA-B*44:02 |
| 6423 | KKLC-1 | ENSG00000204019 | LEHTLLSKGF | 2734 | HLA-B*44:03 |
| 6424 | KKLC-1 | ENSG00000204019 | LINSNTDNNL | 2735 | HLA-B*27:05 |
| 6425 | KKLC-1 | ENSG00000204019 | LLASSILCAL | 2736 | HLA-A*02:03 |
| 6426 | KKLC-1 | ENSG00000204019 | LLASSILCAL | 2736 | HLA-A*02:04 |
| 6427 | KKLC-1 | ENSG00000204019 | LLASSILCA | 2737 | HLA-A*02:01 |
| 6428 | KKLC-1 | ENSG00000204019 | LLASSILCA | 2737 | HLA-A*02:03 |
| 6429 | KKLC-1 | ENSG00000204019 | LLLASSILCAL | 2738 | HLA-A*02:01 |
| 6430 | KKLC-1 | ENSG00000204019 | LLLASSILCAL | 2738 | HLA-A*02:04 |
| 6431 | KKLC-1 | ENSG00000204019 | LLLASSILC | 2739 | HLA-A*02:01 |
| 6432 | KKLC-1 | ENSG00000204019 | LSRDILNNF | 2740 | HLA-A*23:01 |
| 6433 | KKLC-1 | ENSG00000204019 | LSRDILNNF | 2740 | HLA-A*24:02 |
| 6434 | KKLC-1 | ENSG00000204019 | LSRDILNNF | 2740 | HLA-A*32:01 |
| 6435 | KKLC-1 | ENSG00000204019 | LSRDILNNF | 2740 | HLA-A*33:01 |
| 6436 | KKLC-1 | ENSG00000204019 | LSRDILNNF | 2740 | HLA-A*33:03 |
| 6437 | KKLC-1 | ENSG00000204019 | LSRDILNNF | 2740 | HLA-B*46:01 |
| 6438 | KKLC-1 | ENSG00000204019 | LSRDILNNF | 2740 | HLA-B*57:01 |
| 6439 | KKLC-1 | ENSG00000204019 | LSRDILNNF | 2740 | HLA-B*58:01 |
| 6440 | KKLC-1 | ENSG00000204019 | LSRDILNNF | 2740 | HLA-C*02:02 |
| 6441 | KKLC-1 | ENSG00000204019 | LSRDILNNF | 2740 | HLA-C*16:01 |
| 6442 | KKLC-1 | ENSG00000204019 | LVELEHTLL | 2741 | HLA-A*01:01 |
| 6443 | KKLC-1 | ENSG00000204019 | LVELEHTLL | 2741 | HLA-A*02:07 |
| 6444 | KKLC-1 | ENSG00000204019 | LVELEHTLL | 2741 | HLA-B*38:01 |
| 6445 | KKLC-1 | ENSG00000204019 | LVELEHTLL | 2741 | HLA-C*05:01 |
| 6446 | KKLC-1 | ENSG00000204019 | LVELEHTLL | 2741 | HLA-C*07:01 |
| 6447 | KKLC-1 | ENSG00000204019 | LVELEHTL | 2742 | HLA-C*05:01 |
| 6448 | KKLC-1 | ENSG00000204019 | LVELEHTL | 2742 | HLA-C*07:04 |
| 6449 | KKLC-1 | ENSG00000204019 | LVNLSMVENK | 2743 | HLA-A*03:02 |
| 6450 | KKLC-1 | ENSG00000204019 | LVNLSMVENK | 2743 | HLA-B*27:02 |
| 6451 | KKLC-1 | ENSG00000204019 | LVRPSSSGLI | 2744 | HLA-C*07:02 |
| 6452 | KKLC-1 | ENSG00000204019 | LVRPSSSGL | 2745 | HLA-A*02:03 |
| 6453 | KKLC-1 | ENSG00000204019 | LVRPSSSGL | 2745 | HLA-A*32:01 |
| 6454 | KKLC-1 | ENSG00000204019 | LVRPSSSGL | 2745 | HLA-B*07:02 |
| 6455 | KKLC-1 | ENSG00000204019 | LVRPSSSGL | 2745 | HLA-B*08:01 |
| 6456 | KKLC-1 | ENSG00000204019 | LVRPSSSGL | 2745 | HLA-B*15:01 |
| 6457 | KKLC-1 | ENSG00000204019 | LVRPSSSGL | 2745 | HLA-B*40:02 |
| 6458 | KKLC-1 | ENSG00000204019 | LVRPSSSGL | 2745 | HLA-B*46:01 |
| 6459 | KKLC-1 | ENSG00000204019 | LVRPSSSGL | 2745 | HLA-C*01:02 |
| 6460 | KKLC-1 | ENSG00000204019 | LVRPSSSGL | 2745 | HLA-C*03:03 |
| 6461 | KKLC-1 | ENSG00000204019 | LVRPSSSGL | 2745 | HLA-C*03:04 |
| 6462 | KKLC-1 | ENSG00000204019 | LVRPSSSGL | 2745 | HLA-C*07:02 |
| 6463 | KKLC-1 | ENSG00000204019 | LVRPSSSGL | 2745 | HLA-C*07:04 |
| 6464 | KKLC-1 | ENSG00000204019 | LVRPSSSGL | 2745 | HLA-C*14:02 |
| 6465 | KKLC-1 | ENSG00000204019 | MSSNSTAL | 2746 | HLA-C*01:02 |
| 6466 | KKLC-1 | ENSG00000204019 | MSSNSTAL | 2746 | HLA-C*03:03 |
| 6467 | KKLC-1 | ENSG00000204019 | MSSNSTAL | 2746 | HLA-C*03:04 |
| 6468 | KKLC-1 | ENSG00000204019 | MSSNSTAL | 2746 | HLA-C*05:01 |
| 6469 | KKLC-1 | ENSG00000204019 | MSSNSTAL | 2746 | HLA-C*07:04 |
| 6470 | KKLC-1 | ENSG00000204019 | MSSNSTAL | 2746 | HLA-C*14:02 |
| 6471 | KKLC-1 | ENSG00000204019 | MSSNSTAL | 2746 | HLA-C*16:01 |
| 6472 | KKLC-1 | ENSG00000204019 | MVENKLVEL | 2747 | HLA-A*02:07 |
| 6473 | KKLC-1 | ENSG00000204019 | MVENKLVEL | 2747 | HLA-A*68:02 |
| 6474 | KKLC-1 | ENSG00000204019 | MVENKLVEL | 2747 | HLA-B*08:01 |
| 6475 | KKLC-1 | ENSG00000204019 | MVENKLVEL | 2747 | HLA-B*35:03 |
| 6476 | KKLC-1 | ENSG00000204019 | MVENKLVEL | 2747 | HLA-B*38:01 |
| 6477 | KKLC-1 | ENSG00000204019 | MVENKLVEL | 2747 | HLA-B*55:01 |
| 6478 | KKLC-1 | ENSG00000204019 | MVENKLVEL | 2747 | HLA-C*01:02 |
| 6479 | KKLC-1 | ENSG00000204019 | MVENKLVEL | 2747 | HLA-C*03:04 |
| 6480 | KKLC-1 | ENSG00000204019 | MVENKLVEL | 2747 | HLA-C*05:01 |
| 6481 | KKLC-1 | ENSG00000204019 | MVENKLVEL | 2747 | HLA-C*07:04 |
| 6482 | KKLC-1 | ENSG00000204019 | NLSMVENKL | 2748 | HLA-A*02:04 |
| 6483 | KKLC-1 | ENSG00000204019 | NNFPHSIAR | 284 | HLA-A*31:01 |
| 6484 | KKLC-1 | ENSG00000204019 | NNFPHSIAR | 284 | HLA-A*33:01 |
| 6485 | KKLC-1 | ENSG00000204019 | NNFPHSIAR | 284 | HLA-A*33:03 |
| 6486 | KKLC-1 | ENSG00000204019 | NNFPHSIAR | 284 | HLA-A*68:01 |
| 6487 | KKLC-1 | ENSG00000204019 | NNFPHSIAR | 284 | HLA-A*68:02 |
| 6488 | KKLC-1 | ENSG00000204019 | NNFPHSIAR | 284 | HLA-C*07:06 |
| 6489 | KKLC-1 | ENSG00000204019 | NSNTDNNLAVY | 2749 | HLA-A*01:01 |
| 6490 | KKLC-1 | ENSG00000204019 | NSNTDNNLAVY | 2749 | HLA-A*30:02 |
| 6491 | KKLC-1 | ENSG00000204019 | NSTALALVR | 2750 | HLA-A*29:02 |
| 6492 | KKLC-1 | ENSG00000204019 | NSTALALVR | 2750 | HLA-A*33:01 |
| 6493 | KKLC-1 | ENSG00000204019 | NSTALALVR | 2750 | HLA-A*33:03 |
| 6494 | KKLC-1 | ENSG00000204019 | NSTALALVR | 2750 | HLA-A*68:01 |
| 6495 | KKLC-1 | ENSG00000204019 | NSTALALVR | 2750 | HLA-B*27:02 |
| 6496 | KKLC-1 | ENSG00000204019 | NSTALALVR | 2750 | HLA-C*07:06 |
| 6497 | KKLC-1 | ENSG00000204019 | NTDNNLAVYDL | 2751 | HLA-B*27:05 |
| 6498 | KKLC-1 | ENSG00000204019 | NTDNNLAVYDL | 2751 | HLA-B*39:01 |
| 6499 | KKLC-1 | ENSG00000204019 | NTDNNLAVYDL | 2751 | HLA-C*04:01 |
| 6500 | KKLC-1 | ENSG00000204019 | NTDNNLAVY | 23 | HLA-A*01:01 |
| 6501 | KKLC-1 | ENSG00000204019 | NTDNNLAVY | 23 | HLA-A*25:01 |
| 6502 | KKLC-1 | ENSG00000204019 | NTDNNLAVY | 23 | HLA-A*26:01 |
| 6503 | KKLC-1 | ENSG00000204019 | NTDNNLAVY | 23 | HLA-A*29:02 |
| 6504 | KKLC-1 | ENSG00000204019 | NTDNNLAVY | 23 | HLA-A*30:02 |
| 6505 | KKLC-1 | ENSG00000204019 | NTDNNLAVY | 23 | HLA-A*32:01 |
| 6506 | KKLC-1 | ENSG00000204019 | NTDNNLAVY | 23 | HLA-B*18:01 |
| 6507 | KKLC-1 | ENSG00000204019 | NTDNNLAVY | 23 | HLA-B*27:05 |
| 6508 | KKLC-1 | ENSG00000204019 | NTDNNLAVY | 23 | HLA-B*35:01 |
| 6509 | KKLC-1 | ENSG00000204019 | NTDNNLAVY | 23 | HLA-B*39:01 |
| 6510 | KKLC-1 | ENSG00000204019 | NTDNNLAVY | 23 | HLA-B*55:01 |
| 6511 | KKLC-1 | ENSG00000204019 | NTDNNLAVY | 23 | HLA-C*03:03 |
| 6512 | KKLC-1 | ENSG00000204019 | NTDNNLAVY | 23 | HLA-C*04:01 |
| 6513 | KKLC-1 | ENSG00000204019 | NTDNNLAVY | 23 | HLA-C*05:01 |
| 6514 | KKLC-1 | ENSG00000204019 | NTDNNLAVY | 23 | HLA-C*07:01 |
| 6515 | KKLC-1 | ENSG00000204019 | NTDNNLAVY | 23 | HLA-C*07:04 |
| 6516 | KKLC-1 | ENSG00000204019 | NTDNNLAVY | 23 | HLA-C*07:06 |
| 6517 | KKLC-1 | ENSG00000204019 | NTDNNLAVY | 23 | HLA-C*16:02 |
| 6518 | KKLC-1 | ENSG00000204019 | NTDNNLAV | 2752 | HLA-A*01:01 |
| 6519 | KKLC-1 | ENSG00000204019 | NTDNNLAV | 2752 | HLA-C*05:01 |
| 6520 | KKLC-1 | ENSG00000204019 | RFQRNTGEM | 2753 | HLA-C*14:02 |
| 6521 | KKLC-1 | ENSG00000204019 | RILVNLSMV | 2754 | HLA-A*02:01 |
| 6522 | KKLC-1 | ENSG00000204019 | RILVNLSMV | 2754 | HLA-A*02:03 |
| 6523 | KKLC-1 | ENSG00000204019 | RILVNLSMV | 2754 | HLA-A*02:04 |
| 6524 | KKLC-1 | ENSG00000204019 | RILVNLSMV | 2754 | HLA-A*02:07 |
| 6525 | KKLC-1 | ENSG00000204019 | RPSSSGLI | 2755 | HLA-C*07:02 |
| 6526 | KKLC-1 | ENSG00000204019 | RQKRILVNL | 2756 | HLA-A*31:01 |
| 6527 | KKLC-1 | ENSG00000204019 | SMVENKLVEL | 2757 | HLA-A*02:01 |
| 6528 | KKLC-1 | ENSG00000204019 | SMVENKLVEL | 2757 | HLA-A*02:03 |
| 6529 | KKLC-1 | ENSG00000204019 | SMVENKLVEL | 2757 | HLA-A*02:04 |
| 6530 | KKLC-1 | ENSG00000204019 | SMVENKLVEL | 2757 | HLA-A*02:07 |
| 6531 | KKLC-1 | ENSG00000204019 | SMVENKLVEL | 2757 | HLA-B*46:01 |
| 6532 | KKLC-1 | ENSG00000204019 | SMVENKLVEL | 2757 | HLA-B*55:01 |
| 6533 | KKLC-1 | ENSG00000204019 | SNSTALALVR | 2758 | HLA-A*68:01 |
| 6534 | KKLC-1 | ENSG00000204019 | SNSTALALVR | 2758 | HLA-B*27:02 |
| 6535 | KKLC-1 | ENSG00000204019 | SNSTALALVR | 2758 | HLA-C*07:06 |
| 6536 | KKLC-1 | ENSG00000204019 | SNTDNNLAVY | 2759 | HLA-A*25:01 |
| 6537 | KKLC-1 | ENSG00000204019 | SNTDNNLAVY | 2759 | HLA-A*26:01 |
| 6538 | KKLC-1 | ENSG00000204019 | SNTDNNLAVY | 2759 | HLA-A*29:02 |
| 6539 | KKLC-1 | ENSG00000204019 | SNTDNNLAVY | 2759 | HLA-A*30:02 |
| 6540 | KKLC-1 | ENSG00000204019 | SNTDNNLAV | 2760 | HLA-B*13:02 |
| 6541 | KKLC-1 | ENSG00000204019 | SSNSTALALVR | 2761 | HLA-A*03:02 |
| 6542 | KKLC-1 | ENSG00000204019 | SSNSTALALVR | 2761 | HLA-A*11:01 |
| 6543 | KKLC-1 | ENSG00000204019 | SSNSTALALVR | 2761 | HLA-A*31:01 |
| 6544 | KKLC-1 | ENSG00000204019 | SSNSTALALVR | 2761 | HLA-A*33:03 |
| 6545 | KKLC-1 | ENSG00000204019 | SSNSTALALVR | 2761 | HLA-A*68:01 |
| 6546 | KKLC-1 | ENSG00000204019 | SSNSTALALVR | 2761 | HLA-C*07:06 |
| 6547 | KKLC-1 | ENSG00000204019 | SSNSTALAL | 2762 | HLA-A*03:01 |
| 6548 | KKLC-1 | ENSG00000204019 | SSNSTALAL | 2762 | HLA-B*07:02 |
| 6549 | KKLC-1 | ENSG00000204019 | SSNSTALAL | 2762 | HLA-B*13:02 |
| 6550 | KKLC-1 | ENSG00000204019 | SSNSTALAL | 2762 | HLA-B*35:03 |
| 6551 | KKLC-1 | ENSG00000204019 | SSNSTALAL | 2762 | HLA-B*46:01 |
| 6552 | KKLC-1 | ENSG00000204019 | SSNSTALAL | 2762 | HLA-B*58:01 |
| 6553 | KKLC-1 | ENSG00000204019 | SSNSTALAL | 2762 | HLA-C*01:02 |
| 6554 | KKLC-1 | ENSG00000204019 | SSNSTALAL | 2762 | HLA-C*03:03 |
| 6555 | KKLC-1 | ENSG00000204019 | SSNSTALAL | 2762 | HLA-C*03:04 |
| 6556 | KKLC-1 | ENSG00000204019 | SSNSTALAL | 2762 | HLA-C*07:02 |
| 6557 | KKLC-1 | ENSG00000204019 | SSNSTALAL | 2762 | HLA-C*07:06 |
| 6558 | KKLC-1 | ENSG00000204019 | SSNSTALAL | 2762 | HLA-C*14:02 |
| 6559 | KKLC-1 | ENSG00000204019 | SSNSTALAL | 2762 | HLA-C*16:01 |
| 6560 | KKLC-1 | ENSG00000204019 | SSNSTALAL | 2762 | HLA-C*16:02 |
| 6561 | KKLC-1 | ENSG00000204019 | SSSGLINSN | 2763 | HLA-C*12:03 |
| 6562 | KKLC-1 | ENSG00000204019 | STALALVRPSS | 2764 | HLA-C*06:02 |
| 6563 | KKLC-1 | ENSG00000204019 | STALALVRPS | 2765 | HLA-C*06:02 |
| 6564 | KKLC-1 | ENSG00000204019 | STALALVRPS | 2765 | HLA-C*07:01 |
| 6565 | KKLC-1 | ENSG00000204019 | STALALVRPS | 2765 | HLA-C*07:02 |
| 6566 | KKLC-1 | ENSG00000204019 | TALALVRPS | 2766 | HLA-A*31:01 |
| 6567 | KKLC-1 | ENSG00000204019 | TALALVRPS | 2766 | HLA-A*33:01 |
| 6568 | KKLC-1 | ENSG00000204019 | TALALVRPS | 2766 | HLA-C*06:02 |
| 6569 | KKLC-1 | ENSG00000204019 | TALALVRPS | 2766 | HLA-C*07:01 |
| 6570 | KKLC-1 | ENSG00000204019 | TALALVRPS | 2766 | HLA-C*12:03 |
| 6571 | KKLC-1 | ENSG00000204019 | TDNNLAVY | 2767 | HLA-A*30:02 |
| 6572 | KKLC-1 | ENSG00000204019 | TDNNLAVY | 2767 | HLA-B*18:01 |
| 6573 | KKLC-1 | ENSG00000204019 | TDNNLAVY | 2767 | HLA-C*04:01 |
| 6574 | KKLC-1 | ENSG00000204019 | TDNNLAVY | 2767 | HLA-C*07:01 |
| 6575 | KKLC-1 | ENSG00000204019 | TDNNLAVY | 2767 | HLA-C*07:04 |
| 6576 | KKLC-1 | ENSG00000204019 | TGEMSSNSTAL | 2768 | HLA-B*35:03 |
| 6577 | KKLC-1 | ENSG00000204019 | TGEMSSNSTAL | 2768 | HLA-B*40:01 |
| 6578 | KKLC-1 | ENSG00000204019 | TLLSKGFRGA | 2769 | HLA-A*02:03 |
| 6579 | KKLC-1 | ENSG00000204019 | VELEHTLLS | 2770 | HLA-B*49:01 |
| 6580 | KKLC-1 | ENSG00000204019 | VELEHTLL | 2771 | HLA-A*23:01 |
| 6581 | KKLC-1 | ENSG00000204019 | VELEHTLL | 2771 | HLA-A*30:01 |
| 6582 | KKLC-1 | ENSG00000204019 | VELEHTLL | 2771 | HLA-B*08:01 |
| 6583 | KKLC-1 | ENSG00000204019 | VELEHTLL | 2771 | HLA-B*18:01 |
| 6584 | KKLC-1 | ENSG00000204019 | VELEHTLL | 2771 | HLA-B*37:01 |
| 6585 | KKLC-1 | ENSG00000204019 | VELEHTLL | 2771 | HLA-B*40:01 |
| 6586 | KKLC-1 | ENSG00000204019 | VELEHTLL | 2771 | HLA-B*40:02 |
| 6587 | KKLC-1 | ENSG00000204019 | VELEHTLL | 2771 | HLA-B*49:01 |
| 6588 | KKLC-1 | ENSG00000204019 | VELEHTLL | 2771 | HLA-C*04:01 |
| 6589 | KKLC-1 | ENSG00000204019 | VELEHTLL | 2771 | HLA-C*07:01 |
| 6590 | KKLC-1 | ENSG00000204019 | VENKLVEL | 2772 | HLA-A*30:01 |
| 6591 | KKLC-1 | ENSG00000204019 | VENKLVEL | 2772 | HLA-B*18:01 |
| 6592 | KKLC-1 | ENSG00000204019 | VENKLVEL | 2772 | HLA-B*37:01 |
| 6593 | KKLC-1 | ENSG00000204019 | VENKLVEL | 2772 | HLA-B*40:01 |
| 6594 | KKLC-1 | ENSG00000204019 | VENKLVEL | 2772 | HLA-B*40:02 |
| 6595 | KKLC-1 | ENSG00000204019 | VENKLVEL | 2772 | HLA-B*49:01 |
| 6596 | KKLC-1 | ENSG00000204019 | VNLSMVENKL | 2773 | HLA-A*23:01 |
| 6597 | KKLC-1 | ENSG00000204019 | VNLSMVENK | 2774 | HLA-B*27:02 |
| 6598 | KKLC-1 | ENSG00000204019 | VRPSSSGLIN | 2775 | HLA-C*07:01 |
| 6599 | KKLC-1 | ENSG00000204019 | VRPSSSGLI | 2776 | HLA-C*06:02 |
| 6600 | KKLC-1 | ENSG00000204019 | VRPSSSGL | 2777 | HLA-C*01:02 |
| 6601 | KKLC-1 | ENSG00000204019 | VRPSSSGL | 2777 | HLA-C*07:02 |
| 6602 | KKLC-1 | ENSG00000204019 | VYDLSRDIL | 2778 | HLA-A*23:01 |
| 6603 | KKLC-1 | ENSG00000204019 | VYDLSRDIL | 2778 | HLA-A*24:02 |
| 6604 | KKLC-1 | ENSG00000204019 | VYDLSRDIL | 2778 | HLA-B*35:01 |
| 6605 | KKLC-1 | ENSG00000204019 | VYDLSRDIL | 2778 | HLA-B*35:03 |
| 6606 | KKLC-1 | ENSG00000204019 | VYDLSRDIL | 2778 | HLA-B*55:01 |
| 6607 | KKLC-1 | ENSG00000204019 | VYDLSRDIL | 2778 | HLA-C*04:01 |
| 6608 | KKLC-1 | ENSG00000204019 | VYDLSRDI | 2779 | HLA-B*35:03 |
| 6609 | KKLC-1 | ENSG00000204019 | VYDLSRDI | 2779 | HLA-B*51:01 |
| 6610 | KKLC-1 | ENSG00000204019 | VYDLSRDI | 2779 | HLA-C*04:01 |
| 6611 | KKLC-1 | ENSG00000204019 | YLLLASSI | 2780 | HLA-B*13:02 |
| 6612 | KKLC-1 | ENSG00000204019 | YLLLASSI | 2780 | HLA-B*51:01 |

1. An isolated antigen binding protein (ABP) that specifically binds to a human leukocyte antigen (HLA)-PEPTIDE target, wherein the HLA-PEPTIDE target comprises an HLA-restricted peptide complexed with an HLA Class I molecule, wherein the HLA-restricted peptide is located in the peptide binding groove of an α1/α2 heterodimer portion of the HLA Class I molecule, wherein the HLA-peptide is selected from Table A, and wherein:
a. the HLA Class I molecule is HLA subtype A*02:01 and the HLA-restricted peptide comprises the sequence LLASSILCA,
b. the HLA Class I molecule is HLA subtype A*01:01 and the HLA-restricted peptide comprises the sequence EVDPIGHLY,
c. the HLA Class I molecule is HLA subtype B*44:02 and the HLA-restricted peptide comprises the sequence GEMSSNSTAL,
d. the HLA Class I molecule is HLA subtype A*02:01 and the HLA-restricted peptide comprises the sequence GVYDGEEHSV,
e. the HLA Class I molecule is HLA subtype *01:01 and the HLA-restricted peptide comprises the sequence EVDPIGHVY, or
f. the HLA Class I molecule is HLA subtype HLA-A*01:01 and the HLA-restricted peptide comprises the sequence NTDNNLAVY.

2-14. (canceled)

15. The isolated ABP of claim 1, wherein the ABP comprises a CDR-H3 comprising a sequence set forth in any one of SEQ ID NOS: 2902-2933 and/or wherein the ABP comprises a CDR-L3 comprising a sequence set forth in any one of SEQ ID NOS: 2971-2993.

16. (canceled)

17. The isolated ABP of claim 1, wherein the ABP comprises the CDR-H3 and the CDR-L3 from the scFv designated G2-P2E07, G2-P2E03, G2-P2A11, G2-P2C06, G2-P1G01, G2-P1C02, G2-P1H01, G2-P1B12, G2-P1B06, G2-P2H10, G2-P1H10, G2-P2C11, G2-P1C09, G2-P1A10, G2-P1B10, G2-P1D07, G2-P1E05, G2-P1D03, G2-P1G12, G2-P2H11, G2-P1C03, G2-P1G07, G2-P1F12, G2-P1G03, G2-P2B08, G2-P2A10, G2-P2D04, G2-P1C06, G2-P2A09, G2-P1B08, G2-P1E03, G2-P2A03, G2-P2F01, G2-P1H11, or G2-P1D06.

18. (canceled)

19. The isolated ABP of claim 1, wherein the ABP comprises a VH sequence selected from 2781-2815 and/or wherein the ABP comprises a VL sequence selected from 2816-2850.

20-21. (canceled)

22. The isolated ABP of claim 1, wherein the ABP binds to the HLA-PEPTIDE target (i) via residues 6-9 of the restricted peptide NTDNNLAVY and via residues 157-160 of the HLA subtype allele A*0101 or (ii) via residues 3-8 of the restricted peptide NTDNNLAVY.

23-96. (canceled)

97. An isolated HLA-PEPTIDE target, wherein the HLA-PEPTIDE target comprises an HLA-restricted peptide complexed with an HLA Class I molecule, wherein the HLA-restricted peptide is located in in the peptide binding groove of an α1/α2 heterodimer portion of the HLA Class I molecule, and wherein the HLA-PEPTIDE target is selected from Table A, with the proviso that the isolated HLA-PEPTIDE target is not any one of Target nos. 6364-6369, 6386-6389, 6500, 6521-6524, or 6578 and is not an HLA-PEPTIDE target found in Table B or Table C.

98. The isolated HLA-PEPTIDE target of claim 97, wherein
a. the HLA Class I molecule is HLA subtype A*02:01 and the HLA-restricted peptide comprises the sequence LLASSILCA,
b. the HLA Class I molecule is HLA subtype A*01:01 and the HLA-restricted peptide comprises the sequence EVDPIGHLY,
c. the HLA Class I molecule is HLA subtype B*44:02 and the HLA-restricted peptide comprises the sequence GEMSSNSTAL,
d. the HLA Class I molecule is HLA subtype A*02:01 and the HLA-restricted peptide comprises the sequence GVYDGEEHSV,
e. the HLA Class I molecule is HLA subtype *01:01 and the HLA-restricted peptide comprises the sequence EVDPIGHVY, or
f. the HLA Class I molecule is HLA subtype HLA-A*01:01 and the HLA-restricted peptide comprises the sequence NTDNNLAVY.

99-110. (canceled)

111. A composition comprising an HLA-PEPTIDE target of claim 97 attached to a solid support.

112-114. (canceled)

115. A reaction mixture comprising
a. an isolated and purified α-subunit of an HLA subtype as described in Table A;
a. an isolated and purified β2-microglobin subunit of the HLA subtype;
b. an isolated and purified restricted peptide as described in Table A; and
c. a reaction buffer.

116-117. (canceled)

118. An isolated polynucleotide comprising a first nucleic acid sequence encoding an HLA-restricted peptide as defined in claim 97, operably linked to a promoter, and a second nucleic acid sequence encoding an HLA subtype as defined in claim 97, wherein the second nucleic acid is operably linked to the same or different promoter as the first nucleic acid sequence, and wherein the encoded peptide and encoded HLA subtype form an HLA/peptide complex as defined in claim 97.

119-123. (canceled)

124. A host cell comprising (a) a heterologous HLA-PEPTIDE target of claim 97 or (b) an HLA-restricted peptide as described in Table A.

125-128. (canceled)

129. A cell culture system comprising
a. a host cell of claim 124, and
b. a cell culture medium comprising a restricted peptide as described in Table A.

130-141. (canceled)

142. An isolated polynucleotide or set of polynucleotides encoding the antigen binding protein of claim 97 or an antigen-binding portion thereof.

143-145. (canceled)

146. A method of producing an antigen binding protein comprising expressing the antigen binding protein with a host cell comprising the isolated polynucleotide of claim 142 and isolating the expressed antigen binding protein.

147. (canceled)

148. A method of treating cancer in a subject, comprising administering to the subject an effective amount of the antigen binding protein of claim 97.

149. (canceled)

150. A kit comprising
(1)(a) the antigen binding protein of claim 97 or (1)(b) a pharmaceutical composition comprising the antigen binding protein of claim 97 and a pharmaceutically acceptable excipient; and
(2) instructions for use.

151-152. (canceled)

153. A composition comprising an amino acid sequence comprising a polypeptide of at least one HLA-PEPTIDE target of claim 97.

154. A virus comprising the isolated polynucleotide or set of polynucleotides of claim 142.

155-156. (canceled)

157. A method of identifying an antigen binding protein of claim 97, comprising providing at least one HLA-PEPTIDE target listed in Table A; and binding the at least one target with the antigen binding protein, thereby identifying the antigen binding protein.

158-173. (canceled)

174. A method of identifying an antigen binding protein of claim 97, comprising obtaining one or more cells comprising the antigen binding protein; activating the one or more cells with at least one HLA-PEPTIDE target listed in Table A presented on a natural or an artificial antigen presenting cell (APC); and identifying the antigen binding protein via selection of one or more cells activated by interaction with at least one HLA-PEPTIDE target listed in Table A.

175-178. (canceled)

The application's sequence listing, which the Patent Office published only in electronic form, follows.

SEQUENCE LISTING (4363 sequences)

SEQ ID NO: 1 - protein, 9 aa, Homo sapiens
EVDPIGHLY

SEQ ID NO: 2 - protein, 9 aa, Homo sapiens
FVQENYLEY

SEQ ID NO: 3 - protein, 9 aa, Homo sapiens
LVHFLLLKY

SEQ ID NO: 4 - protein, 10 aa, Homo sapiens
MEVDPIGHLY

SEQ ID NO: 5 - protein, 9 aa, Homo sapiens
FPVQATIDF

SEQ ID NO: 6 - protein, 9 aa, Homo sapiens
EVDPIGHVY

SEQ ID NO: 7 - protein, 10 aa, Homo sapiens
MEVDPIGHVY

SEQ ID NO: 8 - protein, 11 aa, Homo sapiens
AEMLGSVVGNW

SEQ ID NO: 9 - protein, 11 aa, Homo sapiens
AEMLERVIKNY

SEQ ID NO: 10 - protein, 9 aa, Homo sapiens
AETSYVKVL

SEQ ID NO: 11 - protein, 9 aa, Homo sapiens
ALLEEEEGV

SEQ ID NO: 12 - protein, 9 aa, Homo sapiens
EVDPASNTY

SEQ ID NO: 13 - protein, 9 aa, Homo sapiens
KVDELAHFL

SEQ ID NO: 14 - protein, 11 aa, Homo sapiens
RQVPGSNPARY

SEQ ID NO: 15 - protein, 9 aa, Homo sapiens
SALPTTISF

SEQ ID NO: 16 - protein, 10 aa, Homo sapiens
KVDELAHFLL

SEQ ID NO: 17 - protein, 9 aa, Homo sapiens
ALFGLLVYL

SEQ ID NO: 18 - protein, 9 aa, Homo sapiens
STSAPAISR

SEQ ID NO: 19 - protein, 10 aa, Homo sapiens
KEVDPASNTY

SEQ ID NO: 20 - protein, 11 aa, Homo sapiens
AEMLGSVIRNF

SEQ ID NO: 21 - protein, 11 aa, Homo sapiens
GLLGDNQIMPK

SEQ ID NO: 22 - protein, 9 aa, Homo sapiens
PRALVETSY

SEQ ID NO: 23 - protein, 9 aa, Homo sapiens
NTDNNLAVY

SEQ ID NO: 24 - protein, 11 aa, Homo sapiens
AEMLESVIKNY

SEQ ID NO: 25 - protein, 9 aa, Homo sapiens
EELSVMEVY

SEQ ID NO: 26 - protein, 11 aa, Homo sapiens
EVYDGREHSAY

SEQ ID NO: 27 - protein, 9 aa, Homo sapiens
EYVIKVSAR

SEQ ID NO: 28 - protein, 9 aa, Homo sapiens
KVLEYVIKV

SEQ ID NO: 29 - protein, 9 aa, Homo sapiens
LVGFLLLKY

SEQ ID NO: 30 - protein, 9 aa, Homo sapiens
SAFPTTINF

SEQ ID NO: 31 - protein, 9 aa, Homo sapiens
STLPTTINY

SEQ ID NO: 32 - protein, 9 aa, Homo sapiens
DAAHPGPSV

SEQ ID NO: 33 - protein, 10 aa, Homo sapiens
FPMGTPDPEY

SEQ ID NO: 34 - protein, 11 aa, Homo sapiens
RVQHASPAGAY

SEQ ID NO: 35 - protein, 9 aa, Homo sapiens
SLDPSVTHL

SEQ ID NO: 36 - protein, 10 aa, Homo sapiens
VQHASPAGAY

SEQ ID NO: 37 - protein, 9 aa, Homo sapiens
IFLDFNHFY

SEQ ID NO: 38 - protein, 9 aa, Homo sapiens
LVQEKYLEY

SEQ ID NO: 39 - protein, 11 aa, Homo sapiens
RQVPDSDPARY

SEQ ID NO: 40 - protein, 11 aa, Homo sapiens
FLWGPRALIET

SEQ ID NO: 41 - protein, 11 aa, Homo sapiens
FLWGPRALVET

SEQ ID NO: 42 - protein, 9 aa, Homo sapiens
LVQENYLEY

SEQ ID NO: 43 - protein, 9 aa, Homo sapiens
EVLNAVGVY

SEQ ID NO: 44 - protein, 9 aa, Homo sapiens
GAVSLLLRY

SEQ ID NO: 45 - protein, 9 aa, Homo sapiens
LLDPVQRNL

SEQ ID NO: 46 - protein, 9 aa, Homo sapiens
TFDSVAVEF

SEQ ID NO: 47 - protein, 9 aa, Homo sapiens
YSDVMLENY

SEQ ID NO: 48 - protein, 9 aa, Homo sapiens
TLDEKVAEL

SEQ ID NO: 49 - protein, 8 aa, Homo sapiens
TAFIGNSI

SEQ ID NO: 50 - protein, 9 aa, Homo sapiens
AFDDIATYF

SEQ ID NO: 51 - protein, 10 aa, Homo sapiens
SPASDAYIVF

SEQ ID NO: 52 - protein, 10 aa, Homo sapiens
VYKSPASDAY

SEQ ID NO: 53 - protein, 9 aa, Homo sapiens
AMNSLSAMY

SEQ ID NO: 54 - protein, 9 aa, Homo sapiens
ASQEDILLK

SEQ ID NO: 55 - protein, 9 aa, Homo sapiens
ATMTQQLEK

SEQ ID NO: 56 - protein, 11 aa, Homo sapiens
EEIGVENIREF

SEQ ID NO: 57 - protein, 10 aa, Homo sapiens
GTVESISVKK

SEQ ID NO: 58 - protein, 10 aa, Homo sapiens
STSGELIGEY

SEQ ID NO: 59 - protein, 9 aa, Homo sapiens
VYIAELEKI

SEQ ID NO: 60 - protein, 11 aa, Homo sapiens
AGQDLSAYLLK

SEQ ID NO: 61 - protein, 9 aa, Homo sapiens
SVVAHLSTY

SEQ ID NO: 62 - protein, 9 aa, Homo sapiens
AAAGVSSTK

SEQ ID NO: 63 - protein, 9 aa, Homo sapiens
KVNPNGHTY

SEQ ID NO: 64 - protein, 11 aa, Homo sapiens
AEILESVIRNY

SEQ ID NO: 65 - protein, 11 aa, Homo sapiens
RQVPGSDPARY

SEQ ID NO: 66 - protein, 9 aa, Homo sapiens
SSPSVVASL

SEQ ID NO: 67 - protein, 10 aa, Homo sapiens
LLDPAQRNLY

SEQ ID NO: 68 - protein, 8 aa, Homo sapiens
LTDQPSAY

SEQ ID NO: 69 - protein, 8 aa, Homo sapiens
AFDVASFL

SEQ ID NO: 70 - protein, 9 aa, Homo sapiens
SSLPTTMNY

SEQ ID NO: 71 - protein, 10 aa, Homo sapiens
EEIIPLNRIY

SEQ ID NO: 72 - protein, 10 aa, Homo sapiens
TSDTDVEVLY

SEQ ID NO: 73 - protein, 11 aa, Homo sapiens
TFQDIILEARY

SEQ ID NO: 74 - protein, 10 aa, Homo sapiens
YFVQENYLEY

SEQ ID NO: 75 - protein, 9 aa, Homo sapiens
WVQENYLEY

SEQ ID NO: 76 - protein, 9 aa, Homo sapiens
EVRDYVEER

SEQ ID NO: 77 - protein, 9 aa, Homo sapiens
VLTSGIVFV

SEQ ID NO: 78 - protein, 8 aa, Homo sapiens
NALSSLKI

SEQ ID NO: 79 - protein, 10 aa, Homo sapiens
NAVLASGTAF

SEQ ID NO: 80 - protein, 9 aa, Homo sapiens
ASAPPQKQK

SEQ ID NO: 81 - protein, 9 aa, Homo sapiens
EIDNSELLY

SEQ ID NO: 82 - protein, 9 aa, Homo sapiens
KVDEAVAVL

SEQ ID NO: 83 - protein, 9 aa, Homo sapiens
NGKQIYVGR

SEQ ID NO: 84 - protein, 9 aa, Homo sapiens
SPAGPILSI

SEQ ID NO: 85 - protein, 9 aa, Homo sapiens
LPYASTLGY

SEQ ID NO: 86 - protein, 9 aa, Homo sapiens
DVADKLVTF

SEQ ID NO: 87 - protein, 9 aa, Homo sapiens
GTVESISVK

SEQ ID NO: 88 - protein, 9 aa, Homo sapiens
IENQAVPAF

SEQ ID NO: 89 - protein, 9 aa, Homo sapiens
AVLQKFLEH

SEQ ID NO: 90 - protein, 9 aa, Homo sapiens
QPAAPGPAL

SEQ ID NO: 91 - protein, 9 aa, Homo sapiens
DEDQAMRAF

SEQ ID NO: 92 - protein, 10 aa, Homo sapiens
NPIGDTGVKF

SEQ ID NO: 93 - protein, 8 aa, Homo sapiens
NADLQSEF

SEQ ID NO: 94 - protein, 9 aa, Homo sapiens
SEVSFLEYY

SEQ ID NO: 95 - protein, 9 aa, Homo sapiens
SLSNRLYYL

SEQ ID NO: 96 - protein, 10 aa, Homo sapiens
GVYDGEEHSV

SEQ ID NO: 97 - protein, 8 aa, Homo sapiens
DANFIPTV

SEQ ID NO: 98 - protein, 9 aa, Homo sapiens
EELGVMGVY

SEQ ID NO: 99 - protein, 8 aa, Homo sapiens
YPREGSEV

SEQ ID NO: 100 - protein, 9 aa, Homo sapiens
ATDLHGVSR

SEQ ID NO: 101 - protein, 11 aa, Homo sapiens
TEQLTITGKKW

SEQ ID NO: 102 - protein, 10 aa, Homo sapiens
AEIEPVSAVW

SEQ ID NO: 103 - protein, 10 aa, Homo sapiens
SEQQLSQKVF

SEQ ID NO: 104 - protein, 10 aa, Homo sapiens
LLDPVQRNLY

SEQ ID NO: 105 - protein, 9 aa, Homo sapiens
LYSDINITY

SEQ ID NO: 106 - protein, 9 aa, Homo sapiens
YADLSPNEL

SEQ ID NO: 107 - protein, 9 aa, Homo sapiens
YPFKPKLTI

SEQ ID NO: 108 - protein, 11 aa, Homo sapiens
YSDINITYVNY

SEQ ID NO: 109 - protein, 8 aa, Homo sapiens
YSDINITY

SEQ ID NO: 110 - protein, 9 aa, Homo sapiens
QVKIWFQNR

SEQ ID NO: 111 - protein, 8 aa, Homo sapiens
TPFYAPRL

SEQ ID NO: 112 - protein, 10 aa, Homo sapiens
GTMKIHILQK

SEQ ID NO: 113 - protein, 9 aa, Homo sapiens
SYFITSLSY

SEQ ID NO: 114 - protein, 9 aa, Homo sapiens
SALDESNTY

SEQ ID NO: 115 - protein, 9 aa, Homo sapiens
IESEPLFTY

SEQ ID NO: 116 - protein, 9 aa, Homo sapiens
DEALGGTAF

SEQ ID NO: 117 - protein, 9 aa, Homo sapiens
EVQSDYSSY

SEQ ID NO: 118 - protein, 9 aa, Homo sapiens
GLFDVFLRF

SEQ ID NO: 119 - protein, 9 aa, Homo sapiens
VVIEQSSSL

SEQ ID NO: 120 - protein, 9 aa, Homo sapiens
SALGVTITK

SEQ ID NO: 121 - protein, 10 aa, Homo sapiens
GTASLTLPPK

SEQ ID NO: 122 - protein, 10 aa, Homo sapiens
VEVDGPELKF

SEQ ID NO: 123 - protein, 9 aa, Homo sapiens
DAYKFAADV

SEQ ID NO: 124 - protein, 9 aa, Homo sapiens
DVNNQLNSR

SEQ ID NO: 125 - protein, 9 aa, Homo sapiens
IPIEPVESM

SEQ ID NO: 126 - protein, 10 aa, Homo sapiens
SSQTAAQVTK

SEQ ID NO: 127 - protein, 9 aa, Homo sapiens
QSPQGASAL

SEQ ID NO: 128 - protein, 9 aa, Homo sapiens
AVLASGTAF

SEQ ID NO: 129 - protein, 11 aa, Homo sapiens
EVVEGKEWGSF

SEQ ID NO: 130 - protein, 9 aa, Homo sapiens
NSAINPLIY

SEQ ID NO: 131 - protein, 9 aa, Homo sapiens
RYLQVVLLY

SEQ ID NO: 132 - protein, 11 aa, Homo sapiens
FQNPHGETLLY

SEQ ID NO: 133 - protein, 11 aa, Homo sapiens
SVMDLVGSILK

SEQ ID NO: 134 - protein, 11 aa, Homo sapiens
EVRDMSEHVTR

SEQ ID NO: 135 - protein, 10 aa, Homo sapiens
AALASVGHLY

SEQ ID NO: 136 - protein, 11 aa, Homo sapiens
VTESESGSPEY

SEQ ID NO: 137 - protein, 9 aa, Homo sapiens
SIDWFMVTV

SEQ ID NO: 138 - protein, 8 aa, Homo sapiens
LEEEVVTF

SEQ ID NO: 139 - protein, 9 aa, Homo sapiens
NASGPDPAL

SEQ ID NO: 140 - protein, 9 aa, Homo sapiens
QSPQGASSL

SEQ ID NO: 141 - protein, 9 aa, Homo sapiens
SESEMFPKF

SEQ ID NO: 142 - protein, 9 aa, Homo sapiens
NFQGIRFHY

SEQ ID NO: 143 - protein, 8 aa, Homo sapiens
DAAVTHSI

SEQ ID NO: 144 - protein, 9 aa, Homo sapiens
LYKPDSNEF

SEQ ID NO: 145 - protein, 9 aa, Homo sapiens
MAAAGIPSM

SEQ ID NO: 146 - protein, 9 aa, Homo sapiens
MAAGGIPSM

SEQ ID NO: 147 - protein, 9 aa, Homo sapiens
MAATPIPAM

SEQ ID NO: 148 - protein, 10 aa, Homo sapiens
NEFAVGTKNY

SEQ ID NO: 149 - protein, 9 aa, Homo sapiens
QYAAVTHNI

SEQ ID NO: 150 - protein, 9 aa, Homo sapiens
SLFRAVITK

SEQ ID NO: 151 - protein, 9 aa, Homo sapiens
FFLPVSVVY

SEQ ID NO: 152 - protein, 9 aa, Homo sapiens
IYGFFNENF

SEQ ID NO: 153 - protein, 11 aa, Homo sapiens
DYIHKNDNVQR

SEQ ID NO: 154 - protein, 9 aa, Homo sapiens
IPALPLPTI

SEQ ID NO: 155 - protein, 9 aa, Homo sapiens
STSDVKLEK

SEQ ID NO: 156 - protein, 9 aa, Homo sapiens
AEARPVPHW

SEQ ID NO: 157 - protein, 10 aa, Homo sapiens
MPAVKNVISY

SEQ ID NO: 158 - protein, 10 aa, Homo sapiens
SPFSGGPVSF

SEQ ID NO: 159 - protein, 9 aa, Homo sapiens
TAAPATLEL

SEQ ID NO: 160 - protein, 9 aa, Homo sapiens
TAAAPGSPF

SEQ ID NO: 161 - protein, 9 aa, Homo sapiens
IAKVTGVAF

SEQ ID NO: 162 - protein, 9 aa, Homo sapiens
ALAETSYVK

SEQ ID NO: 163 - protein, 10 aa, Homo sapiens
AMIENFNAKY

SEQ ID NO: 164 - protein, 9 aa, Homo sapiens
DEDGKIVGY

SEQ ID NO: 165 - protein, 10 aa, Homo sapiens
DVPHGHITSL

SEQ ID NO: 166 - protein, 9 aa, Homo sapiens
LPENYQMKY

SEQ ID NO: 167 - protein, 8 aa, Homo sapiens
DAVVIALV

SEQ ID NO: 168 - protein, 9 aa, Homo sapiens
EVVGVVYVY

SEQ ID NO: 169 - protein, 8 aa, Homo sapiens
FPYLVLTI

SEQ ID NO: 170 - protein, 10 aa, Homo sapiens
ILLFWKPLRY

SEQ ID NO: 171 - protein, 8 aa, Homo sapiens
LEVVGVVY

SEQ ID NO: 172 - protein, 9 aa, Homo sapiens
LLFWKPLRY

SEQ ID NO: 173 - protein, 8 aa, Homo sapiens
LPQTPLVI

SEQ ID NO: 174 - protein, 9 aa, Homo sapiens
VAIDQYNTF

SEQ ID NO: 175 - protein, 10 aa, Homo sapiens
ITDPTDPVDY

SEQ ID NO: 176 - protein, 9 aa, Homo sapiens
LLPASSFSV

SEQ ID NO: 177 - protein, 9 aa, Homo sapiens
SIWEGLVTV

SEQ ID NO: 178 - protein, 9 aa, Homo sapiens
IVNPPPPEY

SEQ ID NO: 179 - protein, 9 aa, Homo sapiens
FLAPLSFYL

SEQ ID NO: 180 - protein, 9 aa, Homo sapiens
VNTNVVLRY

SEQ ID NO: 181 - protein, 9 aa, Homo sapiens
ASVEASKLK

SEQ ID NO: 182 - protein, 9 aa, Homo sapiens
EVISVQMSM

SEQ ID NO: 183 - protein, 9 aa, Homo sapiens
TATLLIVRY

SEQ ID NO: 184 - protein, 10 aa, Homo sapiens
TEDPTGHFLW

SEQ ID NO: 185 - protein, 8 aa, Homo sapiens
TIKTKYVL

SEQ ID NO: 186 - protein, 8 aa, Homo sapiens
YEVISVQM

SEQ ID NO: 187 - protein, 10 aa, Homo sapiens
ALDPPVDVFV

SEQ ID NO: 188 - protein, 9 aa, Homo sapiens
HAGEDVAVF

SEQ ID NO: 189 - protein, 9 aa, Homo sapiens
AFGDILHRY

SEQ ID NO: 190 - protein, 9 aa, Homo sapiens
ENVPLIGKY

SEQ ID NO: 191 - protein, 10 aa, Homo sapiens
SSIFGLAPGK

SEQ ID NO: 192 - protein, 9 aa, Homo sapiens
LPTDLFNSV

SEQ ID NO: 193 - protein, 9 aa, Homo sapiens
DTFSYPIER

SEQ ID NO: 194 - protein, 10 aa, Homo sapiens
EVPSGVIPNL

SEQ ID NO: 195 - protein, 9 aa, Homo sapiens
LYATVIHDI

SEQ ID NO: 196 - protein, 10 aa, Homo sapiens
SSYNRGLISK

SEQ ID NO: 197 - protein, 10 aa, Homo sapiens
ALDESNTYQL

SEQ ID NO: 198 - protein, 10 aa, Homo sapiens
AEQRDDILYF

SEQ ID NO: 199 - protein, 11 aa, Homo sapiens
FLWGPRALAET

SEQ ID NO: 200 - protein, 9 aa, Homo sapiens
IVQEPTEEK

SEQ ID NO: 201 - protein, 11 aa, Homo sapiens
EESVLVGYVDY

SEQ ID NO: 202 - protein, 9 aa, Homo sapiens
EVKARTQEL

SEQ ID NO: 203 - protein, 11 aa, Homo sapiens
SSDSESEMFPK

SEQ ID NO: 204 - protein, 9 aa, Homo sapiens
DANFIPTVY

SEQ ID NO: 205 - protein, 9 aa, Homo sapiens
QESDLRLFL

SEQ ID NO: 206 - protein, 9 aa, Homo sapiens
YSEKISYVY

SEQ ID NO: 207 - protein, 10 aa, Homo sapiens
RVHPVSTMVK

SEQ ID NO: 208 - protein, 11 aa, Homo sapiens
AEDEDGKIVGY

SEQ ID NO: 209 - protein, 10 aa, Homo sapiens
EEPLSVTAKY

SEQ ID NO: 210 - protein, 10 aa, Homo sapiens
AFLEVVGVVY

SEQ ID NO: 211 - protein, 9 aa, Homo sapiens
ILTDINWRF

SEQ ID NO: 212 - protein, 9 aa, Homo sapiens
SEDPILTAF

SEQ ID NO: 213 - protein, 9 aa, Homo sapiens
EETPFSRLI

SEQ ID NO: 214 - protein, 9 aa, Homo sapiens
VYIHENAKF

SEQ ID NO: 215 - protein, 9 aa, Homo sapiens
ITPQRQSAL

SEQ ID NO: 216 - protein, 9 aa, Homo sapiens
EPYPVTKNI

SEQ ID NO: 217 - protein, 9 aa, Homo sapiens
IAAAFAVDY

SEQ ID NO: 218 - protein, 8 aa, Homo sapiens
MPLEVYEM

SEQ ID NO: 219 - protein, 11 aa, Homo sapiens
AEATQSMNAKY

SEQ ID NO: 220 - protein, 9 aa, Homo sapiens
ATQSMNAKY

SEQ ID NO: 221 - protein, 9 aa, Homo sapiens
KLDTVGVFL

SEQ ID NO: 222 - protein, 9 aa, Homo sapiens
EEIENLYRF

SEQ ID NO: 223 - protein, 11 aa, Homo sapiens
VLLDEGAMLLY

SEQ ID NO: 224 - protein, 10 aa, Homo sapiens
EEFQVLVKKI

SEQ ID NO: 225 - protein, 9 aa, Homo sapiens
TLDDLFQEL

SEQ ID NO: 226 - protein, 9 aa, Homo sapiens
TYDGMLSDV

SEQ ID NO: 227 - protein, 8 aa, Homo sapiens
TEFVGATM

SEQ ID NO: 228 - protein, 8 aa, Homo sapiens
IPFTPPTV

SEQ ID NO: 229 - protein, 11 aa, Homo sapiens
TVADPLPQVAK

SEQ ID NO: 230 - protein, 9 aa, Homo sapiens
TVADPLPQV

SEQ ID NO: 231 - protein, 9 aa, Homo sapiens
GYLVVGFVY

SEQ ID NO: 232 - protein, 11 aa, Homo sapiens
GQNLSIHSGQY

SEQ ID NO: 233 - protein, 11 aa, Homo sapiens
SVYPPAANMEY

SEQ ID NO: 234 - protein, 9 aa, Homo sapiens
SSSSPISNK

SEQ ID NO: 235 - protein, 10 aa, Homo sapiens
FLSSLFPFRY

SEQ ID NO: 236 - protein, 10 aa, Homo sapiens
QELEVGKEAY

SEQ ID NO: 237 - protein, 10 aa, Homo sapiens
SEQPPASLGF

SEQ ID NO: 238 - protein, 11 aa, Homo sapiens
GELREISGNQY

SEQ ID NO: 239 - protein, 9 aa, Homo sapiens
EVKKEYASM

SEQ ID NO: 240 - protein, 9 aa, Homo sapiens
DYFPVILKR

SEQ ID NO: 241 - protein, 10 aa, Homo sapiens
KEGEPVEFTF

SEQ ID NO: 242 - protein, 9 aa, Homo sapiens
TVAVTQMNK

SEQ ID NO: 243 - protein, 9 aa, Homo sapiens
VLDEVDAAL

SEQ ID NO: 244 - protein, 9 aa, Homo sapiens
DVRIEVGLY

SEQ ID NO: 245 - protein, 9 aa, Homo sapiens
HPFKPDATY

SEQ ID NO: 246 - protein, 11 aa, Homo sapiens
AVLSAGPIITR

SEQ ID NO: 247 - protein, 11 aa, Homo sapiens
DTPDPPTIISY

SEQ ID NO: 248 - protein, 10 aa, Homo sapiens
FPAERDISVY

SEQ ID NO: 249 - protein, 9 aa, Homo sapiens
STIPGVSAY

SEQ ID NO: 250 - protein, 9 aa, Homo sapiens
AGMTIATSY

SEQ ID NO: 251 - protein, 11 aa, Homo sapiens
DSLAAVVLQNR

SEQ ID NO: 252 - protein, 9 aa, Homo sapiens
GTGIAGITK

SEQ ID NO: 253 - protein, 11 aa, Homo sapiens
GTGTGIAGITK

SEQ ID NO: 254 - protein, 9 aa, Homo sapiens
IEAELHISY

SEQ ID NO: 255 - protein, 8 aa, Homo sapiens
LPLTGPLV

SEQ ID NO: 256 - protein, 9 aa, Homo sapiens
TVDSNQQTY

SEQ ID NO: 257 - protein, 10 aa, Homo sapiens
TYQTYTHNQF

SEQ ID NO: 258 - protein, 9 aa, Homo sapiens
DPFFKQQAV

SEQ ID NO: 259 - protein, 10 aa, Homo sapiens
GEANELLHTF

SEQ ID NO: 260 - protein, 9 aa, Homo sapiens
NFDSLPVQI

SEQ ID NO: 261 - protein, 11 aa, Homo sapiens
ATAQPSQVRQK

SEQ ID NO: 262 - protein, 9 aa, Homo sapiens
SVLSEQFTK

SEQ ID NO: 263 - protein, 9 aa, Homo sapiens
DIQEPYYGR

SEQ ID NO: 264 - protein, 9 aa, Homo sapiens
TSDIQEPYY

SEQ ID NO: 265 - protein, 9 aa, Homo sapiens
FLPDAFVTM

SEQ ID NO: 266 - protein, 9 aa, Homo sapiens
IFAHLGLDY

SEQ ID NO: 267 - protein, 9 aa, Homo sapiens
KLFTSVFGV

SEQ ID NO: 268 - protein, 9 aa, Homo sapiens
YYDLVESTF

SEQ ID NO: 269 - protein, 9 aa, Homo sapiens
YPVTKNISL

SEQ ID NO: 270 - protein, 8 aa, Homo sapiens
SEVSFLEY

SEQ ID NO: 271 - protein, 10 aa, Homo sapiens
ITWDAPAITK

SEQ ID NO: 272 - protein, 9 aa, Homo sapiens
TEVVEGKEW

SEQ ID NO: 273 - protein, 9 aa, Homo sapiens
DAWGGNTAY

SEQ ID NO: 274 - protein, 9 aa, Homo sapiens
YPAERLTSF

SEQ ID NO: 275 - protein, 9 aa, Homo sapiens
EEVSNLVNY

SEQ ID NO: 276 - protein, 9 aa, Homo sapiens
IEAGTSESY

SEQ ID NO: 277 - protein, 10 aa, Homo sapiens
IFSNWGHPKY

SEQ ID NO: 278 - protein, 9 aa, Homo sapiens
VTMEHISEK

SEQ ID NO: 279 - protein, 9 aa, Homo sapiens
YLSEALQEA

SEQ ID NO: 280 - protein, 10 aa, Homo sapiens
EVVGELVAKF

SEQ ID NO: 281 - protein, 9 aa, Homo sapiens
GMMDDYTYV

SEQ ID NO: 282 - protein, 10 aa, Homo sapiens
AEMAVGLVVF

SEQ ID NO: 283 - protein, 10 aa, Homo sapiens
SENDIPSVAF

SEQ ID NO: 284 - protein, 9 aa, Homo sapiens
NNFPHSIAR

SEQ ID NO: 285 - protein, 11 aa, Homo sapiens
RGNEVISVMNR

SEQ ID NO: 286 - protein, 11 aa, Homo sapiens
KTYETNLEIKK

SEQ ID NO: 287 - protein, 10 aa, Homo sapiens
AALDNTNIGK

SEQ ID NO: 288 - protein, 9 aa, Homo sapiens
ALASVGHLY

SEQ ID NO: 289 - protein, 9 aa, Homo sapiens
EVSNKIVGY

SEQ ID NO: 290 - protein, 9 aa, Homo sapiens
SFLDASFVY

SEQ ID NO: 291 - protein, 11 aa, Homo sapiens
TVSQAKVQVNK

SEQ ID NO: 292 - protein, 9 aa, Homo sapiens
ELKQDISSF

SEQ ID NO: 293 - protein, 9 aa, Homo sapiens
VENEFKAEY

SEQ ID NO: 294 - protein, 9 aa, Homo sapiens
SFSNVWHLY

SEQ ID NO: 295 - protein, 8 aa, Homo sapiens
DAAINSHI

SEQ ID NO: 296 - protein, 9 aa, Homo sapiens
VALENFFRY

SEQ ID NO: 297 - protein, 11 aa, Homo sapiens
AEMLTNVISRY

SEQ ID NO: 298 - protein, 9 aa, Homo sapiens
KTLGKIAEK

SEQ ID NO: 299 - protein, 9 aa, Homo sapiens
AQAFTSGKY

SEQ ID NO: 300 - protein, 11 aa, Homo sapiens
DEEDMQAVETY

SEQ ID NO: 301 - protein, 9 aa, Homo sapiens
STKSVSTSY

SEQ ID NO: 302 - protein, 9 aa, Homo sapiens
LVIDTVTEV

SEQ ID NO: 303 - protein, 8 aa, Homo sapiens
VIDTVTEV

SEQ ID NO: 304 - protein, 9 aa, Homo sapiens
YPLNRFSSV

SEQ ID NO: 305 - protein, 9 aa, Homo sapiens
TEIVLENNY

SEQ ID NO: 306 - protein, 9 aa, Homo sapiens
YTALQNAKY

SEQ ID NO: 307 - protein, 9 aa, Homo sapiens
DSFQKVILR

SEQ ID NO: 308 - protein, 10 aa, Homo sapiens
SEPQIVPITF

SEQ ID NO: 309 - protein, 9 aa, Homo sapiens
IYTGVTVSF

SEQ ID NO: 310 - protein, 10 aa, Homo sapiens
SFAHQGLWRY

SEQ ID NO: 311 - protein, 10 aa, Homo sapiens
EEIPQEIQRL

SEQ ID NO: 312 - protein, 9 aa, Homo sapiens
YIENNHLEY

SEQ ID NO: 313 - protein, 10 aa, Homo sapiens
HSEELDPQKY

SEQ ID NO: 314 - protein, 9 aa, Homo sapiens
ALDEKVAEL

SEQ ID NO: 315 - protein, 10 aa, Homo sapiens
GLYDGREHSV

SEQ ID NO: 316 - protein, 11 aa, Homo sapiens
SESSTILVVRY

SEQ ID NO: 317 - protein, 9 aa, Homo sapiens
QTEFPTTYY

SEQ ID NO: 318 - protein, 8 aa, Homo sapiens
TEFPTTYY

SEQ ID NO: 319 - protein, 11 aa, Homo sapiens
TSDPQISTSLY

SEQ ID NO: 320 - protein, 9 aa, Homo sapiens
VLDEEVSNL

SEQ ID NO: 321 - protein, 9 aa, Homo sapiens
FLITQATAY

SEQ ID NO: 322 - protein, 9 aa, Homo sapiens
ALQGALGLY

SEQ ID NO: 323 - protein, 9 aa, Homo sapiens
YPMDPHKEV

SEQ ID NO: 324 - protein, 9 aa, Homo sapiens
LAFLVGQSI

SEQ ID NO: 325 - protein, 9 aa, Homo sapiens
MPSEVSEVL

SEQ ID NO: 326 - protein, 9 aa, Homo sapiens
TAAAFTISY

SEQ ID NO: 327 - protein, 9 aa, Homo sapiens
FFLHPISFY

SEQ ID NO: 328 - protein, 11 aa, Homo sapiens
ASQISSETLIK

SEQ ID NO: 329 - protein, 9 aa, Homo sapiens
ASALFQSNK

SEQ ID NO: 330 - protein, 9 aa, Homo sapiens
SEESVLVGY

SEQ ID NO: 331 - protein, 10 aa, Homo sapiens
ETSYVKVLEY

SEQ ID NO: 332 - protein, 8 aa, Homo sapiens
DEGISSLF

SEQ ID NO: 333 - protein, 9 aa, Homo sapiens
KVNSPIRMK

SEQ ID NO: 334 - protein, 9 aa, Homo sapiens
LPYDIINAF

SEQ ID NO: 335 - protein, 9 aa, Homo sapiens
NVDEGISSL

SEQ ID NO: 336 - protein, 11 aa, Homo sapiens
SVLQQLTPMNK

SEQ ID NO: 337 - protein, 9 aa, Homo sapiens
TPIQTSLAY

SEQ ID NO: 338 - protein, 9 aa, Homo sapiens
EALTPHSSY

SEQ ID NO: 339 - protein, 10 aa, Homo sapiens
FTEIVLENNY

SEQ ID NO: 340 - protein, 9 aa, Homo sapiens
AEVPIEPHW

SEQ ID NO: 341 - protein, 8 aa, Homo sapiens
LPFTIISM

SEQ ID NO: 342 - protein, 9 aa, Homo sapiens
DPSQFNPTY

SEQ ID NO: 343 - protein, 9 aa, Homo sapiens
AEILKNEAY

SEQ ID NO: 344 - protein, 10 aa, Homo sapiens
AENQGLVLKF

SEQ ID NO: 345 - protein, 9 aa, Homo sapiens
ALFETLIQL

SEQ ID NO: 346 - protein, 9 aa, Homo sapiens
ESIEYVQTF

SEQ ID NO: 347 - protein, 10 aa, Homo sapiens
EVIPITNSEL

SEQ ID NO: 348 - protein, 9 aa, Homo sapiens
LPALKIVMI

SEQ ID NO: 349 - protein, 9 aa, Homo sapiens
NEMSVISNM

SEQ ID NO: 350 - protein, 9 aa, Homo sapiens
NTEGLHHLY

SEQ ID NO: 351 - protein, 9 aa, Homo sapiens
NYIIKGNLF

SEQ ID NO: 352 - protein, 9 aa, Homo sapiens
QIADIVTSV

SEQ ID NO: 353 - protein, 9 aa, Homo sapiens
VIPITNSEL

SEQ ID NO: 354 - protein, 9 aa, Homo sapiens
AAPAGPGEL

SEQ ID NO: 355 - protein, 9 aa, Homo sapiens
AESSSKRSF

SEQ ID NO: 356 - protein, 9 aa, Homo sapiens
TEFVGATMF

SEQ ID NO: 357 - protein, 9 aa, Homo sapiens
VYVGDALLY

SEQ ID NO: 358 - protein, 9 aa, Homo sapiens
HPLNGQPLI

SEQ ID NO: 359 - protein, 9 aa, Homo sapiens
LLDGFMITL

SEQ ID NO: 360 - protein, 9 aa, Homo sapiens
VYQKIILKF

SEQ ID NO: 361 - protein, 9 aa, Homo sapiens
EPLSVTASY

SEQ ID NO: 362 - protein, 8 aa, Homo sapiens
DAFVPFSI

SEQ ID NO: 363 - protein, 9 aa, Homo sapiens
ETVSTTLRY

SEQ ID NO: 364 - protein, 11 aa, Homo sapiens
GTETVSTTLRY

SEQ ID NO: 365 - protein, 11 aa, Homo sapiens
AVNPELAPVMK

SEQ ID NO: 366 - protein, 9 aa, Homo sapiens
SAVTPGPYY

SEQ ID NO: 367 - protein, 9 aa, Homo sapiens
RVQVWFQNR

SEQ ID NO: 368 - protein, 9 aa, Homo sapiens
KMAELVHFL

SEQ ID NO: 369 - protein, 11 aa, Homo sapiens
IFINKEDSLLY

SEQ ID NO: 370 - protein, 11 aa, Homo sapiens
GLWEIENNPTV

SEQ ID NO: 371 - protein, 9 aa, Homo sapiens
SAYGMPMYK

SEQ ID NO: 372 - protein, 9 aa, Homo sapiens
AAAAAAATY

SEQ ID NO: 373 - protein, 9 aa, Homo sapiens
RVAVPVLVK

SEQ ID NO: 374 - protein, 11 aa, Homo sapiens
SQFPHGAMGSY

SEQ ID NO: 375 - protein, 8 aa, Homo sapiens
DAVAAMSV

SEQ ID NO: 376 - protein, 10 aa, Homo sapiens
NWAPPEYYLY

SEQ ID NO: 377 - protein, 9 aa, Homo sapiens
TEETIKAEF

SEQ ID NO: 378 - protein, 9 aa, Homo sapiens
WAPPEYYLY

SEQ ID NO: 379 - protein, 10 aa, Homo sapiens
KEVDPTGHSF

SEQ ID NO: 380 - protein, 9 aa, Homo sapiens
DEEQNLVAF

SEQ ID NO: 381 - protein, 10 aa, Homo sapiens
EEAANSGYSW

SEQ ID NO: 382 - protein, 10 aa, Homo sapiens
EEQNLVAFQY

SEQ ID NO: 383 - protein, 11 aa, Homo sapiens
STEDEEQLLQK

SEQ ID NO: 384 - protein, 9 aa, Homo sapiens
ASIDREIAM

SEQ ID NO: 385 - protein, 10 aa, Homo sapiens
RLGPVPGTFK

SEQ ID NO: 386 - protein, 11 aa, Homo sapiens
SSSQTAAQVTK

SEQ ID NO: 387 - protein, 9 aa, Homo sapiens
FLDLQVNSL

SEQ ID NO: 388 - protein, 11 aa, Homo sapiens
VLREIEDEWLY

SEQ ID NO: 389 - protein, 9 aa, Homo sapiens
DESITFHSI

SEQ ID NO: 390 - protein, 9 aa, Homo sapiens
EEVARFLTY

SEQ ID NO: 391 - protein, 9 aa, Homo sapiens
EVASAVSAF

SEQ ID NO: 392 - protein, 9 aa, Homo sapiens
LLPGSIHFV

SEQ ID NO: 393 - protein, 9 aa, Homo sapiens
EEQLLQKVM

SEQ ID NO: 394 - protein, 9 aa, Homo sapiens
KVLEFLAKV

SEQ ID NO: 395 - protein, 11 aa, Homo sapiens
SLDDIIIYKEL

SEQ ID NO: 396 - protein, 10 aa, Homo sapiens
KEGEAVEFTF

SEQ ID NO: 397 - protein, 8 aa, Homo sapiens
DEGAMLLY

SEQ ID NO: 398 - protein, 10 aa, Homo sapiens
KTYETNLEIK

SEQ ID NO: 399 - protein, 10 aa, Homo sapiens
LLDEGAMLLY

SEQ ID NO: 400 - protein, 9 aa, Homo sapiens
TPLVIAISY

SEQ ID NO: 401 - protein, 9 aa, Homo sapiens
VEVGEVKSW

SEQ ID NO: 402 - protein, 11 aa, Homo sapiens
WEVEVGEVKSW

SEQ ID NO: 403 - protein, 10 aa, Homo sapiens
TTAPGTVHSY

SEQ ID NO: 404 - protein, 9 aa, Homo sapiens
ASSQVPRVM

SEQ ID NO: 405 - protein, 9 aa, Homo sapiens
WSDSSVTTY

SEQ ID NO: 406 - protein, 9 aa, Homo sapiens
KAFDDIATY

SEQ ID NO: 407 - protein, 9 aa, Homo sapiens
HVSNLVFAY

SEQ ID NO: 408 - protein, 9 aa, Homo sapiens
ILGSVWLAY

SEQ ID NO: 409 - protein, 9 aa, Homo sapiens
KEFGGPFFW

SEQ ID NO: 410 - protein, 9 aa, Homo sapiens
LPFTIPTSM

SEQ ID NO: 411 - protein, 10 aa, Homo sapiens
VVNQGKGMFK

SEQ ID NO: 412 - protein, 9 aa, Homo sapiens
VYGAFPVQL

SEQ ID NO: 413 - protein, 9 aa, Homo sapiens
YTSDGNTKY

SEQ ID NO: 414 - protein, 9 aa, Homo sapiens
VYGSYLYKL

SEQ ID NO: 415 - protein, 9 aa, Homo sapiens
QISEVEPKY

SEQ ID NO: 416 - protein, 9 aa, Homo sapiens
HAPNLPYRY

SEQ ID NO: 417 - protein, 11 aa, Homo sapiens
LPFDGSPKITY

SEQ ID NO: 418 - protein, 9 aa, Homo sapiens
LPFDGSPKI

SEQ ID NO: 419 - protein, 10 aa, Homo sapiens
SVIGGPSTYK

SEQ ID NO: 420 - protein, 11 aa, Homo sapiens
TIYNTTQPRQK

SEQ ID NO: 421 - protein, 8 aa, Homo sapiens
EAFLSPEY

SEQ ID NO: 422 - protein, 9 aa, Homo sapiens
AAMNIARAL

SEQ ID NO: 423 - protein, 10 aa, Homo sapiens
ASYEIGYILK

SEQ ID NO: 424 - protein, 11 aa, Homo sapiens
EVVGGAVRVQY

SEQ ID NO: 425 - protein, 9 aa, Homo sapiens
LVKEGLASY

SEQ ID NO: 426 - protein, 9 aa, Homo sapiens
ALYDGLTLV

SEQ ID NO: 427 - protein, 9 aa, Homo sapiens
SLLKLIVEL

SEQ ID NO: 428 - protein, 9 aa, Homo sapiens
IASNYNVSY

SEQ ID NO: 429 - protein, 11 aa, Homo sapiens
RQAPGSDPVRY

SEQ ID NO: 430 - protein, 9 aa, Homo sapiens
MAATGVSSM

SEQ ID NO: 431 - protein, 9 aa, Homo sapiens
DTSPLLLGR

SEQ ID NO: 432 - protein, 9 aa, Homo sapiens
HVSPSPLIY

SEQ ID NO: 433 - protein, 9 aa, Homo sapiens
WVNGLTLRY

SEQ ID NO: 434 - protein, 9 aa, Homo sapiens
GTISFVQYK

SEQ ID NO: 435 - protein, 9 aa, Homo sapiens
AFVTMTGGF

SEQ ID NO: 436 - protein, 11 aa, Homo sapiens
NLWEKKGLLLY

SEQ ID NO: 437 - protein, 9 aa, Homo sapiens
EVISQLTRV

SEQ ID NO: 438 - protein, 9 aa, Homo sapiens
YTEQDLYSY

SEQ ID NO: 439 - protein, 9 aa, Homo sapiens
NYFLDPVTI

SEQ ID NO: 440 - protein, 9 aa, Homo sapiens
AVDEESPFL

SEQ ID NO: 441 - protein, 9 aa, Homo sapiens
TPYHLSTVV

SEQ ID NO: 442 - protein, 9 aa, Homo sapiens
NLDHYTNAY

SEQ ID NO: 443 - protein, 9 aa, Homo sapiens
DAFDVASFL

SEQ ID NO: 444 - protein, 10 aa, Homo sapiens
RTFPITGLRY

SEQ ID NO: 445 - protein, 11 aa, Homo sapiens
FTEEDLHFVLY

SEQ ID NO: 446 - protein, 11 aa, Homo sapiens
IFVSPKGVLAY

SEQ ID NO: 447 - protein, 9 aa, Homo sapiens
QEGQLPLLF

SEQ ID NO: 448 - protein, 9 aa, Homo sapiens
LLAQQPIYV

SEQ ID NO: 449 - protein, 9 aa, Homo sapiens
AVIEHMQEK

SEQ ID NO: 450 - protein, 11 aa, Homo sapiens
EEIIKNIQKLY

SEQ ID NO: 451 - protein, 9 aa, Homo sapiens
YLIDHPVSL

SEQ ID NO: 452 - protein, 9 aa, Homo sapiens
IYISNSIYF

SEQ ID NO: 453 - protein, 9 aa, Homo sapiens
VVTGNVPLK

SEQ ID NO: 454 - protein, 9 aa, Homo sapiens
ASMSLPPPK

SEQ ID NO: 455 - protein, 9 aa, Homo sapiens
VASPRIISL

SEQ ID NO: 456 - protein, 9 aa, Homo sapiens
MILDNHALY

SEQ ID NO: 457 - protein, 9 aa, Homo sapiens
TLDEKVDEL

SEQ ID NO: 458 - protein, 9 aa, Homo sapiens
LAFGGHIAF

SEQ ID NO: 459 - protein, 9 aa, Homo sapiens
APLGAAAAY

SEQ ID NO: 460 - protein, 9 aa, Homo sapiens
GLFTHTIFY

SEQ ID NO: 461 - protein, 9 aa, Homo sapiens
VPKAKIITI

SEQ ID NO: 462 - protein, 9 aa, Homo sapiens
HTEDKPYKY

SEQ ID NO: 463 - protein, 9 aa, Homo sapiens
HSDSERQYY

SEQ ID NO: 464 - protein, 9 aa, Homo sapiens
SLDWDLHGF

SEQ ID NO: 465 - protein, 10 aa, Homo sapiens
TSLDVPLIGK

SEQ ID NO: 466 - protein, 9 aa, Homo sapiens
EEDLHFVLY

SEQ ID NO: 467 - protein, 10 aa, Homo sapiens
SEAQDKSKLW

SEQ ID NO: 468 - protein, 9 aa, Homo sapiens
AVYNGQWKY

SEQ ID NO: 469 - protein, 9 aa, Homo sapiens
SVTSVFDEK

SEQ ID NO: 470 - protein, 9 aa, Homo sapiens
ALMEVTVYL

SEQ ID NO: 471 - protein, 11 aa, Homo sapiens
EELANVLPISY

SEQ ID NO: 472 - protein, 10 aa, Homo sapiens
SEAGLTANQY

SEQ ID NO: 473 - protein, 9 aa, Homo sapiens
VFYILQLAY

SEQ ID NO: 474 - protein, 11 aa, Homo sapiens
STVDPMKLYEK

SEQ ID NO: 475 - protein, 9 aa, Homo sapiens
YLDLRNTGL

SEQ ID NO: 476 - protein, 10 aa, Homo sapiens
ATIDVTTVER

SEQ ID NO: 477 - protein, 8 aa, Homo sapiens
DPLELHKI

SEQ ID NO: 478 - protein, 9 aa, Homo sapiens
SPEAGLAEY

SEQ ID NO: 479 - protein, 9 aa, Homo sapiens
IPMDGTAVI

SEQ ID NO: 480 - protein, 9 aa, Homo sapiens
GSEVSFLEY

SEQ ID NO: 481 - protein, 9 aa, Homo sapiens
AAGALPLLK

SEQ ID NO: 482 - protein, 9 aa, Homo sapiens
ATYLNLSEK

SEQ ID NO: 483 - protein, 9 aa, Homo sapiens
MPPPLVMSV

SEQ ID NO: 484 - protein, 9 aa, Homo sapiens
VPPWNPQLI

SEQ ID NO: 485 - protein, 8 aa, Homo sapiens
MFDNGSFL

SEQ ID NO: 486 - protein, 9 aa, Homo sapiens
KSGDLVFAK

SEQ ID NO: 487 - protein, 9 aa, Homo sapiens
ATKSGLVVR

SEQ ID NO: 488 - protein, 9 aa, Homo sapiens
LAPPIGNSI

SEQ ID NO: 489 - protein, 11 aa, Homo sapiens
EEGEDRDGHAW

SEQ ID NO: 490 - protein, 9 aa, Homo sapiens
EYLKDPVTI

SEQ ID NO: 491 - protein, 9 aa, Homo sapiens
SEFEQIRLF

SEQ ID NO: 492 - protein, 9 aa, Homo sapiens
AGISSTITR

SEQ ID NO: 493 - protein, 8 aa, Homo sapiens
EETRVLAF

SEQ ID NO: 494 - protein, 9 aa, Homo sapiens
SSEQSPLQK

SEQ ID NO: 495 - protein, 10 aa, Homo sapiens
ALYSGDLHAA

SEQ ID NO: 496 - protein, 9 aa, Homo sapiens
EEFSLQKSY

SEQ ID NO: 497 - protein, 9 aa, Homo sapiens
FLDSLLATL

SEQ ID NO: 498 - protein, 9 aa, Homo sapiens
HAEDISNIM

SEQ ID NO: 499 - protein, 11 aa, Homo sapiens
STVGFGDVVAK

SEQ ID NO: 500 - protein, 9 aa, Homo sapiens
TAFSTGTVF

SEQ ID NO: 501 - protein, 9 aa, Homo sapiens
TVDSVTAFL

SEQ ID NO: 502 - protein, 10 aa, Homo sapiens
GVAALTPVQK

SEQ ID NO: 503 - protein, 10 aa, Homo sapiens
HLLDNADVAL

SEQ ID NO: 504 - protein, 9 aa, Homo sapiens
LLDNADVAL

SEQ ID NO: 505 - protein, 8 aa, Homo sapiens
TETPGTAY

SEQ ID NO: 506 - protein, 8 aa, Homo sapiens
TGPSGNAL

SEQ ID NO: 507 - protein, 9 aa, Homo sapiens
ASFLTTVFK

SEQ ID NO: 508 - protein, 9 aa, Homo sapiens
IYIGNIEHL

SEQ ID NO: 509 - protein, 8 aa, Homo sapiens
DAFPISLI

SEQ ID NO: 510 - protein, 10 aa, Homo sapiens
KTLAEISDRY

SEQ ID NO: 511 - protein, 9 aa, Homo sapiens
VTMEQLRQK

SEQ ID NO: 512 - protein, 8 aa, Homo sapiens
HAYHKVTL

SEQ ID NO: 513 - protein, 9 aa, Homo sapiens
QSEMYISRY

SEQ ID NO: 514 - protein, 11 aa, Homo sapiens
SSEQSARLLDY

SEQ ID NO: 515 - protein, 9 aa, Homo sapiens
ATAQPSQVR

SEQ ID NO: 516 - protein, 11 aa, Homo sapiens
DIISEQKVSEF

SEQ ID NO: 517 - protein, 9 aa, Homo sapiens
ALLGILISV

SEQ ID NO: 518 - protein, 9 aa, Homo sapiens
LYTKAHETF

SEQ ID NO: 519 - protein, 9 aa, Homo sapiens
SYLLGWTTF

SEQ ID NO: 520 - protein, 9 aa, Homo sapiens
AEIEPVSAV

SEQ ID NO: 521 - protein, 11 aa, Homo sapiens
VIIDHGSGFLK

SEQ ID NO: 522 - protein, 8 aa, Homo sapiens
MPYTEAVI

SEQ ID NO: 523 - protein, 9 aa, Homo sapiens
LPVPLDSAF

SEQ ID NO: 524 - protein, 9 aa, Homo sapiens
QELLERQAW

SEQ ID NO: 525 - protein, 9 aa, Homo sapiens
DAYLSYTKV

SEQ ID NO: 526 - protein, 9 aa, Homo sapiens
STNLKMVSK

SEQ ID NO: 527 - protein, 9 aa, Homo sapiens
ALDPPVDVF

SEQ ID NO: 528 - protein, 9 aa, Homo sapiens
YPLSPTISL

SEQ ID NO: 529 - protein, 10 aa, Homo sapiens
HILTHANTNK

SEQ ID NO: 530 - protein, 9 aa, Homo sapiens
SVTTYTGSY

SEQ ID NO: 531 - protein, 9 aa, Homo sapiens
AFLIIVFSY

SEQ ID NO: 532 - protein, 10 aa, Homo sapiens
FFVGIFDIKY

SEQ ID NO: 533 - protein, 9 aa, Homo sapiens
FVGIFDIKY

SEQ ID NO: 534 - protein, 10 aa, Homo sapiens
ILDDNPITRI

SEQ ID NO: 535 - protein, 9 aa, Homo sapiens
LYTLTTNFF

SEQ ID NO: 536 - protein, 10 aa, Homo sapiens
MPLTDGISSF

SEQ ID NO: 537 - protein, 9 aa, Homo sapiens
TEDIGSKGY

SEQ ID NO: 538 - protein, 9 aa, Homo sapiens
GYWGVRLKY

SEQ ID NO: 539 - protein, 9 aa, Homo sapiens
LEEKMIAAY

SEQ ID NO: 540 - protein, 9 aa, Homo sapiens
SLDEALQRV

SEQ ID NO: 541 - protein, 9 aa, Homo sapiens
AVWPLELAY

SEQ ID NO: 542 - protein, 9 aa, Homo sapiens
DTELGSSEY

SEQ ID NO: 543 - protein, 11 aa, Homo sapiens
GLPDIMKPIKL

SEQ ID NO: 544 - protein, 9 aa, Homo sapiens
LPANILTVI

SEQ ID NO: 545 - protein, 9 aa, Homo sapiens
SLAETPASA

SEQ ID NO: 546 - protein, 9 aa, Homo sapiens
SIQQLVPEY

SEQ ID NO: 547 - protein, 9 aa, Homo sapiens
DELEKQIVY

SEQ ID NO: 548 - protein, 9 aa, Homo sapiens
FPLPLAREV

SEQ ID NO: 549 - protein, 10 aa, Homo sapiens
SSMALPSPHK

SEQ ID NO: 550 - protein, 9 aa, Homo sapiens
DVAEAIAFF

SEQ ID NO: 551 - protein, 9 aa, Homo sapiens
DTAVLITRY

SEQ ID NO: 552 - protein, 8 aa, Homo sapiens
NFDGATTL

SEQ ID NO: 553 - protein, 9 aa, Homo sapiens
STNLPLTQK

SEQ ID NO: 554 - protein, 9 aa, Homo sapiens
NYFIDPVTI

SEQ ID NO: 555 - protein, 8 aa, Homo sapiens
DPITFSFI

SEQ ID NO: 556 - protein, 10 aa, Homo sapiens
EVISVQVQDV

SEQ ID NO: 557 - protein, 9 aa, Homo sapiens
SLFESLEYL

SEQ ID NO: 558 - protein, 10 aa, Homo sapiens
AELQASLSKY

SEQ ID NO: 559 - protein, 9 aa, Homo sapiens
IFSDQETFY

SEQ ID NO: 560 - protein, 10 aa, Homo sapiens
AVYNSPQFKK

SEQ ID NO: 561 - protein, 9 aa, Homo sapiens
AVYNSPQFK

SEQ ID NO: 562 - protein, 9 aa, Homo sapiens
SAYGNATSV

SEQ ID NO: 563 - protein, 10 aa, Homo sapiens
FTVDSNQQTY

SEQ ID NO: 564 - protein, 10 aa, Homo sapiens
AVAPHHSGVY

SEQ ID NO: 565 - protein, 9 aa, Homo sapiens
SVSIIGFHK

SEQ ID NO: 566 - protein, 9 aa, Homo sapiens
QSFPPKVNR

SEQ ID NO: 567 - protein, 9 aa, Homo sapiens
FIHEDLNTV

SEQ ID NO: 568 - protein, 9 aa, Homo sapiens
NFFEEVFIY

SEQ ID NO: 569 - protein, 10 aa, Homo sapiens
EEMQIQKSQW

SEQ ID NO: 570 - protein, 9 aa, Homo sapiens
TSDPGLLSY

SEQ ID NO: 571 - protein, 8 aa, Homo sapiens
EESVLVGY

SEQ ID NO: 572 - protein, 9 aa, Homo sapiens
DAHNTHVGI

SEQ ID NO: 573 - protein, 9 aa, Homo sapiens
GFKETAFLY

SEQ ID NO: 574 - protein, 9 aa, Homo sapiens
VYMEDSPSF

SEQ ID NO: 575 - protein, 9 aa, Homo sapiens
AVAAKMEVK

SEQ ID NO: 576 - protein, 9 aa, Homo sapiens
AFLKMIYSY

SEQ ID NO: 577 - protein, 8 aa, Homo sapiens
NEAKFITF

SEQ ID NO: 578 - protein, 9 aa, Homo sapiens
LPKLPKPYI

SEQ ID NO: 579 - protein, 9 aa, Homo sapiens
LPTTAQVTI

SEQ ID NO: 580 - protein, 9 aa, Homo sapiens
LPYYSTSII

SEQ ID NO: 581 - protein, 8 aa, Homo sapiens
LPYYSTSI

SEQ ID NO: 582 - protein, 9 aa, Homo sapiens
VTLAKPVNK

SEQ ID NO: 583 - protein, 10 aa, Homo sapiens
STEPGISNIK

SEQ ID NO: 584 - protein, 9 aa, Homo sapiens
DLNDVTHVY

SEQ ID NO: 585 - protein, 10 aa, Homo sapiens
KLFIPQITTK

SEQ ID NO: 586 - protein, 9 aa, Homo sapiens
YPKLPKPYI

SEQ ID NO: 587 - protein, 8 aa, Homo sapiens
LPLVTVVY

SEQ ID NO: 588 - protein, 9 aa, Homo sapiens
NYGVLHVTF

SEQ ID NO: 589 - protein, 9 aa, Homo sapiens
DETEIRSFF

SEQ ID NO: 590 - protein, 8 aa, Homo sapiens
DETEIRSF

SEQ ID NO: 591 - protein, 9 aa, Homo sapiens
SPVQVITGY

SEQ ID NO: 592 - protein, 11 aa, Homo sapiens
DAYIPGGPLTV

SEQ ID NO: 593 - protein, 11 aa, Homo sapiens
KVHGQPASYAY

SEQ ID NO: 594 - protein, 9 aa, Homo sapiens
KVHGQPASY

SEQ ID NO: 595 - protein, 9 aa, Homo sapiens
SPAPSLESY

SEQ ID NO: 596 - protein, 9 aa, Homo sapiens
TLADALHTL

SEQ ID NO: 597 - protein, 9 aa, Homo sapiens
LPAVQAPVI

SEQ ID NO: 598 - protein, 9 aa, Homo sapiens
YSAARAVSL

SEQ ID NO: 599 - protein, 10 aa, Homo sapiens
VYFGHDSELF

SEQ ID NO: 600 - protein, 8 aa, Homo sapiens
IGYVTPDI

SEQ ID NO: 601 - protein, 8 aa, Homo sapiens
LPLQFLVV

SEQ ID NO: 602 - protein, 9 aa, Homo sapiens
LPPTSSISI

SEQ ID NO: 603 - protein, 9 aa, Homo sapiens
PYPDVTFTL

SEQ ID NO: 604 - protein, 9 aa, Homo sapiens
GEYPDYQQW

SEQ ID NO: 605 - protein, 9 aa, Homo sapiens
MPVPGQHSM

SEQ ID NO: 606 - protein, 9 aa, Homo sapiens
AAVQRAAEL

SEQ ID NO: 607 - protein, 9 aa, Homo sapiens
AIFQGYFAY

SEQ ID NO: 608 - protein, 10 aa, Homo sapiens
AQFSSSAIQK

SEQ ID NO: 609 - protein, 9 aa, Homo sapiens
AFAPTFLVY

SEQ ID NO: 610 - protein, 9 aa, Homo sapiens
DAVRIKTSI

SEQ ID NO: 611 - protein, 9 aa, Homo sapiens
FPILAVPVI

SEQ ID NO: 612 - protein, 9 aa, Homo sapiens
SASVHHNEL

SEQ ID NO: 613 - protein, 9 aa, Homo sapiens
SVSGLVLSH

SEQ ID NO: 614 - protein, 9 aa, Homo sapiens
HPAVTPDAY

SEQ ID NO: 615 - protein, 9 aa, Homo sapiens
SVANSTVAY

SEQ ID NO: 616 - protein, 9 aa, Homo sapiens
YSSSSPLTY

SEQ ID NO: 617 - protein, 9 aa, Homo sapiens
DAPPAILTF

SEQ ID NO: 618 - protein, 8 aa, Homo sapiens
EEIAFSTY

SEQ ID NO: 619 - protein, 9 aa, Homo sapiens
EINPHMSSY

SEQ ID NO: 620 - protein, 9 aa, Homo sapiens
SSYVPIFEK

SEQ ID NO: 621 - protein, 9 aa, Homo sapiens
STIDEYVHR

SEQ ID NO: 622 - protein, 10 aa, Homo sapiens
STMGGFGVGK

SEQ ID NO: 623 - protein, 9 aa, Homo sapiens
TIDEYVHRI

SEQ ID NO: 624 - protein, 11 aa, Homo sapiens
TLNNNIAKAGY

SEQ ID NO: 625 - protein, 9 aa, Homo sapiens
AISITPVHK

SEQ ID NO: 626 - protein, 11 aa, Homo sapiens
AESPLEVPQSF

SEQ ID NO: 627 - protein, 9 aa, Homo sapiens
ALDQKVAFL

SEQ ID NO: 628 - protein, 9 aa, Homo sapiens
EVLNLTGVY

SEQ ID NO: 629 - protein, 9 aa, Homo sapiens
LFIKLGLTY

SEQ ID NO: 630 - protein, 10 aa, Homo sapiens
SLAEQILAKY

SEQ ID NO: 631 - protein, 11 aa, Homo sapiens
SSSSEQSPLQK

SEQ ID NO: 632 - protein, 9 aa, Homo sapiens
LPNTSIHGI

SEQ ID NO: 633 - protein, 9 aa, Homo sapiens
YPNSPVQVI

SEQ ID NO: 634 - protein, 9 aa, Homo sapiens
HAAGFGPEL

SEQ ID NO: 635 - protein, 9 aa, Homo sapiens
GVLILLVRY

SEQ ID NO: 636 - protein, 11 aa, Homo sapiens
GLYGINEDIFL

SEQ ID NO: 637 - protein, 9 aa, Homo sapiens
LMIPNITQY

SEQ ID NO: 638 - protein, 11 aa, Homo sapiens
SVADLTESILK

SEQ ID NO: 639 - protein, 11 aa, Homo sapiens
TLWEIQKELKL

SEQ ID NO: 640 - protein, 9 aa, Homo sapiens
MPHEVTHSM

SEQ ID NO: 641 - protein, 11 aa, Homo sapiens
ATFQTTLPTLK

SEQ ID NO: 642 - protein, 9 aa, Homo sapiens
LETDIHLSY

SEQ ID NO: 643 - protein, 9 aa, Homo sapiens
VLDQNRSTL

SEQ ID NO: 644 - protein, 11 aa, Homo sapiens
QEGSSGMELSW

SEQ ID NO: 645 - protein, 9 aa, Homo sapiens
VPLSTVNRV

SEQ ID NO: 646 - protein, 9 aa, Homo sapiens
AAAAAGLAY

SEQ ID NO: 647 - protein, 9 aa, Homo sapiens
IPYAHSPSV

SEQ ID NO: 648 - protein, 8 aa, Homo sapiens
EEFNVLEM

SEQ ID NO: 649 - protein, 9 aa, Homo sapiens
LPPGGIPGI

SEQ ID NO: 650 - protein, 10 aa, Homo sapiens
KEADPTGHSY

SEQ ID NO: 651 - protein, 9 aa, Homo sapiens
ILYDLKIAL

SEQ ID NO: 652 - protein, 11 aa, Homo sapiens
KVFNNSSTLMK

SEQ ID NO: 653 - protein, 9 aa, Homo sapiens
AEQQPQPQF

SEQ ID NO: 654 - protein, 9 aa, Homo sapiens
IPLGTMSTI

SEQ ID NO: 655 - protein, 9 aa, Homo sapiens
QEFLNVQEY

SEQ ID NO: 656 - protein, 9 aa, Homo sapiens
TEAELMQQF

SEQ ID NO: 657 - protein, 8 aa, Homo sapiens
VTDDPQKF

SEQ ID NO: 658 - protein, 10 aa, Homo sapiens
SLPDKVFIKY

SEQ ID NO: 659 - protein, 9 aa, Homo sapiens
EVAERGTAY

SEQ ID NO: 660 - protein, 10 aa, Homo sapiens
FFSGPKTYKY

SEQ ID NO: 661 - protein, 9 aa, Homo sapiens
GEADIMISF

SEQ ID NO: 662 - protein, 9 aa, Homo sapiens
LPASGLAVF

SEQ ID NO: 663 - protein, 11 aa, Homo sapiens
SSFDAVTMLGK

SEQ ID NO: 664 - protein, 9 aa, Homo sapiens
STDPSALMY

SEQ ID NO: 665 - protein, 11 aa, Homo sapiens
YFFSGPKTYKY

SEQ ID NO: 666 - protein, 9 aa, Homo sapiens
IYSGNSYYF

SEQ ID NO: 667 - protein, 9 aa, Homo sapiens
DMQAVETYR

SEQ ID NO: 668 - protein, 9 aa, Homo sapiens
ASWARIAAR

SEQ ID NO: 669 - protein, 10 aa, Homo sapiens
KEDNPSGHTY

SEQ ID NO: 670 - protein, 11 aa, Homo sapiens
AVRGSDTLWYR

SEQ ID NO: 671 - protein, 9 aa, Homo sapiens
YQKEKNVSI

SEQ ID NO: 672 - protein, 9 aa, Homo sapiens
FFDSIIAEL

SEQ ID NO: 673 - protein, 10 aa, Homo sapiens
VDQIALPNLK

SEQ ID NO: 674 - protein, 9 aa, Homo sapiens
DTFRSISTR

SEQ ID NO: 675 - protein, 9 aa, Homo sapiens
GRGAIADTF

SEQ ID NO: 676 - protein, 10 aa, Homo sapiens
AESEGTKAVL

SEQ ID NO: 677 - protein, 10 aa, Homo sapiens
SLYAIQQQRK

SEQ ID NO: 678 - protein, 9 aa, Homo sapiens
DEAGMLSYF

SEQ ID NO: 679 - protein, 8 aa, Homo sapiens
DEAGMLSY

SEQ ID NO: 680 - protein, 9 aa, Homo sapiens
EEEKLFLSY

SEQ ID NO: 681 - protein, 8 aa, Homo sapiens
ELLTKTSL

SEQ ID NO: 682 - protein, 10 aa, Homo sapiens
HSDEAGMLSY

SEQ ID NO: 683 - protein, 9 aa, Homo sapiens
IVTNVLENR

SEQ ID NO: 684 - protein, 9 aa, Homo sapiens
QGIKDLHAY

SEQ ID NO: 685 - protein, 10 aa, Homo sapiens
SEEEKLFLSY

SEQ ID NO: 686 - protein, 8 aa, Homo sapiens
SEIEAAGF

SEQ ID NO: 687 - protein, 9 aa, Homo sapiens
ASVLIFANK

SEQ ID NO: 688 - protein, 9 aa, Homo sapiens
EEQSLQKLY

SEQ ID NO: 689 - protein, 9 aa, Homo sapiens
QSSERTLSY

SEQ ID NO: 690 - protein, 9 aa, Homo sapiens
ITQDLVQEK

SEQ ID NO: 691 - protein, 9 aa, Homo sapiens
FVADSFPFY

SEQ ID NO: 692 - protein, 8 aa, Homo sapiens
DEGEHLVF

SEQ ID NO: 693 - protein, 9 aa, Homo sapiens
EVATAVNTR

SEQ ID NO: 694 - protein, 9 aa, Homo sapiens
ILPLRFVEL

SEQ ID NO: 695 - protein, 9 aa, Homo sapiens
TVTEKIYYL

SEQ ID NO: 696 - protein, 10 aa, Homo sapiens
EVTNHNIRLF

SEQ ID NO: 697 - protein, 9 aa, Homo sapiens
EYQEIFQQL

SEQ ID NO: 698 - protein, 10 aa, Homo sapiens
LTFPVRPFFY

SEQ ID NO: 699 - protein, 9 aa, Homo sapiens
MPQPVNPEL

SEQ ID NO: 700 - protein, 9 aa, Homo sapiens
NYLVDPVTI

SEQ ID NO: 701 - protein, 9 aa, Homo sapiens
SVSFLNVTK

SEQ ID NO: 702 - protein, 9 aa, Homo sapiens
EEITQGNTL

SEQ ID NO: 703 - protein, 11 aa, Homo sapiens
ITQGNTLLRAR

SEQ ID NO: 704 - protein, 9 aa, Homo sapiens
LPEPFKIAY

SEQ ID NO: 705 - protein, 9 aa, Homo sapiens
QVDDLIETV

SEQ ID NO: 706 - protein, 10 aa, Homo sapiens
VTSLPSGLQK

SEQ ID NO: 707 - protein, 10 aa, Homo sapiens
YLPEPFKIAY

SEQ ID NO: 708 - protein, 9 aa, Homo sapiens
TVQGVVTSF

SEQ ID NO: 709 - protein, 9 aa, Homo sapiens
ASLQDILSH

SEQ ID NO: 710 - protein, 9 aa, Homo sapiens
YTESRSFNY

SEQ ID NO: 711 - protein, 9 aa, Homo sapiens
LLDDIMAEV

SEQ ID NO: 712 - protein, 9 aa, Homo sapiens
DAVEALYKV

SEQ ID NO: 713 - protein, 9 aa, Homo sapiens
YLESHGLAY

SEQ ID NO: 714 - protein, 9 aa, Homo sapiens
AVQTSYTSY

SEQ ID NO: 715 - protein, 9 aa, Homo sapiens
NEVVVSFKW

SEQ ID NO: 716 - protein, 10 aa, Homo sapiens
NVNGQTISLY

SEQ ID NO: 717 - protein, 9 aa, Homo sapiens
SLDASPFSV

SEQ ID NO: 718 - protein, 9 aa, Homo sapiens
STATITKEK

SEQ ID NO: 719 - protein, 9 aa, Homo sapiens
STTGQLTSK

SEQ ID NO: 720 - protein, 8 aa, Homo sapiens
IPLTIISI

SEQ ID NO: 721 - protein, 8 aa, Homo sapiens
LPALEPVI

SEQ ID NO: 722 - protein, 9 aa, Homo sapiens
SEGTKVPAW

SEQ ID NO: 723 - protein, 9 aa, Homo sapiens
YQGSIVHEY

SEQ ID NO: 724 - protein, 9 aa, Homo sapiens
HMAHKVNSL

SEQ ID NO: 725 - protein, 9 aa, Homo sapiens
IVDAIYRQL

SEQ ID NO: 726 - protein, 9 aa, Homo sapiens
KVNSLLDAY

SEQ ID NO: 727 - protein, 8 aa, Homo sapiens
NPKTKSSL

SEQ ID NO: 728 - protein, 8 aa, Homo sapiens
SESLAAVF

SEQ ID NO: 729 - protein, 9 aa, Homo sapiens
IPYLQTVSV

SEQ ID NO: 730 - protein, 9 aa, Homo sapiens
SLADVLVTI

SEQ ID NO: 731 - protein, 9 aa, Homo sapiens
EVITTVYGY

SEQ ID NO: 732 - protein, 9 aa, Homo sapiens
FLQEVITTV

SEQ ID NO: 733 - protein, 11 aa, Homo sapiens
GQSPGAALHIY

SEQ ID NO: 734 - protein, 9 aa, Homo sapiens
LEIEIPTTY

SEQ ID NO: 735 - protein, 9 aa, Homo sapiens
SGHGVSSRY

SEQ ID NO: 736 - protein, 9 aa, Homo sapiens
VEVTVPSSY

SEQ ID NO: 737 - protein, 9 aa, Homo sapiens
GLMAVNQEV

SEQ ID NO: 738 - protein, 10 aa, Homo sapiens
EEPLSVTASY

SEQ ID NO: 739 - protein, 9 aa, Homo sapiens
EESPFLVAV

SEQ ID NO: 740 - protein, 8 aa, Homo sapiens
DEMGVVGY

SEQ ID NO: 741 - protein, 9 aa, Homo sapiens
HEAFGGINW

SEQ ID NO: 742 - protein, 9 aa, Homo sapiens
FFLSMVNNY

SEQ ID NO: 743 - protein, 9 aa, Homo sapiens
IFSQHTFKY

SEQ ID NO: 744 - protein, 9 aa, Homo sapiens
QEINTKSAF

SEQ ID NO: 745 - protein, 11 aa, Homo sapiens
SYLGISAVSEF

SEQ ID NO: 746 - protein, 11 aa, Homo sapiens
ATQRDLIATQK

SEQ ID NO: 747 - protein, 9 aa, Homo sapiens
AVKKGSTAY

SEQ ID NO: 748 - protein, 8 aa, Homo sapiens
DARVVINR

SEQ ID NO: 749 - protein, 9 aa, Homo sapiens
TAYHVSLIV

SEQ ID NO: 750 - protein, 9 aa, Homo sapiens
VEDPVTVEY

SEQ ID NO: 751 - protein, 9 aa, Homo sapiens
NADLQSEFL

SEQ ID NO: 752 - protein, 9 aa, Homo sapiens
HAFDGTILF

SEQ ID NO: 753 - protein, 9 aa, Homo sapiens
KTGPSRSSY

SEQ ID NO: 754 - protein, 9 aa, Homo sapiens
ASAVQLPEK

SEQ ID NO: 755 - protein, 10 aa, Homo sapiens
ATPSADFLLK

SEQ ID NO: 756 - protein, 9 aa, Homo sapiens
AVASAFKEK

SEQ ID NO: 757 - protein, 9 aa, Homo sapiens
GYSHPSFFY

SEQ ID NO: 758 - protein, 9 aa, Homo sapiens
ETTDIKGLF

SEQ ID NO: 759 - protein, 10 aa, Homo sapiens
AQLGGLSDGY

SEQ ID NO: 760 - protein, 9 aa, Homo sapiens
TELEKEFHF

SEQ ID NO: 761 - protein, 11 aa, Homo sapiens
EEDVWVIIHLY

SEQ ID NO: 762 - protein, 10 aa, Homo sapiens
ALQLVPGSPK

SEQ ID NO: 763 - protein, 9 aa, Homo sapiens
MAGASIPAM

SEQ ID NO: 764 - protein, 9 aa, Homo sapiens
FEAGTSVTY

SEQ ID NO: 765 - protein, 9 aa, Homo sapiens
SQDSFIPGV

SEQ ID NO: 766 - protein, 9 aa, Homo sapiens
MPYAHGPSV

SEQ ID NO: 767 - protein, 10 aa, Homo sapiens
SEQDLQQLRL

SEQ ID NO: 768 - protein, 9 aa, Homo sapiens
SSPLSAASL

SEQ ID NO: 769 - protein, 9 aa, Homo sapiens
STQGDMMQK

SEQ ID NO: 770 - protein, 9 aa, Homo sapiens
TTADVALLK

SEQ ID NO: 771 - protein, 9 aa, Homo sapiens
NAFKFSSTF

SEQ ID NO: 772 - protein, 9 aa, Homo sapiens
AETDNLDHY

SEQ ID NO: 773 - protein, 9 aa, Homo sapiens
TTHIANHSY

SEQ ID NO: 774 - protein, 11 aa, Homo sapiens
ATVEEDFQPFR

SEQ ID NO: 775 - protein, 10 aa, Homo sapiens
AEFPNSFVTL

SEQ ID NO: 776 - protein, 9 aa, Homo sapiens
FLPQNFLVY

SEQ ID NO: 777 - protein, 9 aa, Homo sapiens
DEQQIINSF

SEQ ID NO: 778 - protein, 10 aa, Homo sapiens
IYNPENVETF

SEQ ID NO: 779 - protein, 9 aa, Homo sapiens
LSDSNYSKY

SEQ ID NO: 780 - protein, 9 aa, Homo sapiens
STSEPNLTK

SEQ ID NO: 781 - protein, 10 aa, Homo sapiens
ITQDLVQEKY

SEQ ID NO: 782 - protein, 9 aa, Homo sapiens
AVMTKPKVK

SEQ ID NO: 783 - protein, 9 aa, Homo sapiens
IVKVPILNR

SEQ ID NO: 784 - protein, 9 aa, Homo sapiens
LAVAVPVVY

SEQ ID NO: 785 - protein, 9 aa, Homo sapiens
SVIDVQLGK

SEQ ID NO: 786 - protein, 9 aa, Homo sapiens
SAFGYLHSI

SEQ ID NO: 787 - protein, 9 aa, Homo sapiens
ASGPPAKAK

SEQ ID NO: 788 - protein, 10 aa, Homo sapiens
AYIPKLLQLF

SEQ ID NO: 789 - protein, 10 aa, Homo sapiens
GTIPGPIAQR

SEQ ID NO: 790 - protein, 10 aa, Homo sapiens
KTNPSVFFVK

SEQ ID NO: 791 - protein, 9 aa, Homo sapiens
STLGGVNMK

SEQ ID NO: 792 - protein, 9 aa, Homo sapiens
VPADSFRTI

SEQ ID NO: 793 - protein, 9 aa, Homo sapiens
EEMNILAKL

SEQ ID NO: 794 - protein, 10 aa, Homo sapiens
SVQEIYNFTR

SEQ ID NO: 795 - protein, 9 aa, Homo sapiens
VLNQPGILK

SEQ ID NO: 796 - protein, 9 aa, Homo sapiens
SIAPNIFLK

SEQ ID NO: 797 - protein, 9 aa, Homo sapiens
IADVDVQEV

SEQ ID NO: 798 - protein, 9 aa, Homo sapiens
ASGPPAPAR

SEQ ID NO: 799 - protein, 8 aa, Homo sapiens
LPLYVKEI

SEQ ID NO: 800 - protein, 9 aa, Homo sapiens
TFPITGLRY

SEQ ID NO: 801 - protein, 10 aa, Homo sapiens
SEAGVYVLRF

SEQ ID NO: 802 - protein, 9 aa, Homo sapiens
YPVTLNVLY

SEQ ID NO: 803 - protein, 8 aa, Homo sapiens
SEKISYVY

SEQ ID NO: 804 - protein, 10 aa, Homo sapiens
EVITSAPGAM

SEQ ID NO: 805 - protein, 10 aa, Homo sapiens
QVINGEMQFY

SEQ ID NO: 806 - protein, 9 aa, Homo sapiens
YLLEKIPLV

SEQ ID NO: 807 - protein, 11 aa, Homo sapiens
ASVQGELAQLK

SEQ ID NO: 808 - protein, 9 aa, Homo sapiens
EVDPAGHSY

SEQ ID NO: 809 - protein, 10 aa, Homo sapiens
NSDNVGYASY

SEQ ID NO: 810 - protein, 10 aa, Homo sapiens
QVADINLMGY

SEQ ID NO: 811 - protein, 10 aa, Homo sapiens
KTADIISEQK

SEQ ID NO: 812 - protein, 9 aa, Homo sapiens
QTLNNNIAK

SEQ ID NO: 813 - protein, 9 aa, Homo sapiens
GEMPSERQY

SEQ ID NO: 814 - protein, 9 aa, Homo sapiens
LPQGSMSSI

SEQ ID NO: 815 - protein, 10 aa, Homo sapiens
SEQSARLLDY

SEQ ID NO: 816 - protein, 9 aa, Homo sapiens
ASFTSFNPK

SEQ ID NO: 817 - protein, 9 aa, Homo sapiens
QYPVGTASL

SEQ ID NO: 818 - protein, 8 aa, Homo sapiens
IEAIRAEY

SEQ ID NO: 819 - protein, 9 aa, Homo sapiens
SSPEGTREL

SEQ ID NO: 820 - protein, 9 aa, Homo sapiens
AVSSAALTH

SEQ ID NO: 821 - protein, 9 aa, Homo sapiens
GTLAMILTK

SEQ ID NO: 822 - protein, 11 aa, Homo sapiens
SVYDNVRSVGK

SEQ ID NO: 823 - protein, 10 aa, Homo sapiens
YMSPDIALLY

SEQ ID NO: 824 - protein, 9 aa, Homo sapiens
DAWSGSNAY

SEQ ID NO: 825 - protein, 9 aa, Homo sapiens
YEVLTPLKW

SEQ ID NO: 826 - protein, 9 aa, Homo sapiens
NASNDTYLY

SEQ ID NO: 827 - protein, 9 aa, Homo sapiens
AEAITAPLF

SEQ ID NO: 828 - protein, 9 aa, Homo sapiens
AVQIWFENR

SEQ ID NO: 829 - protein, 10 aa, Homo sapiens
IVPSFTFPNV

SEQ ID NO: 830 - protein, 10 aa, Homo sapiens
QSEKEPGQQY

SEQ ID NO: 831 - protein, 9 aa, Homo sapiens
SEKEPGQQY

SEQ ID NO: 832 - protein, 9 aa, Homo sapiens
LPVLENVSY

SEQ ID NO: 833 - protein, 9 aa, Homo sapiens
MVNAAVNTY

SEQ ID NO: 834 - protein, 9 aa, Homo sapiens
FLIEQIDVL

SEQ ID NO: 835 - protein, 10 aa, Homo sapiens
SYLPGLLYKF

SEQ ID NO: 836 - protein, 9 aa, Homo sapiens
LYASWMYQL

SEQ ID NO: 837 - protein, 9 aa, Homo sapiens
AAGIIVIAK

SEQ ID NO: 838 - protein, 10 aa, Homo sapiens
HVSDPGLPGK

SEQ ID NO: 839 - protein, 9 aa, Homo sapiens
IFGEMVHLY

SEQ ID NO: 840 - protein, 10 aa, Homo sapiens
IVDSSPGIGK

SEQ ID NO: 841 - protein, 9 aa, Homo sapiens
TSDSNLNKY

SEQ ID NO: 842 - protein, 9 aa, Homo sapiens
VSDPGLPGK

SEQ ID NO: 843 - protein, 11 aa, Homo sapiens
AEAELTGGSEW

SEQ ID NO: 844 - protein, 9 aa, Homo sapiens
LPTSGTPLI

SEQ ID NO: 845 - protein, 9 aa, Homo sapiens
VPTQVNISF

SEQ ID NO: 846 - protein, 11 aa, Homo sapiens
TESSVKDPVAW

SEQ ID NO: 847 - protein, 11 aa, Homo sapiens
RSYSPAPGKQK

SEQ ID NO: 848 - protein, 11 aa, Homo sapiens
EAAPESLDVVY

SEQ ID NO: 849 - protein, 11 aa, Homo sapiens
LALSIGTPYRY

SEQ ID NO: 850 - protein, 9 aa, Homo sapiens
MPLQVPPQI

SEQ ID NO: 851 - protein, 9 aa, Homo sapiens
MAYEKRVLI

SEQ ID NO: 852 - protein, 9 aa, Homo sapiens
VYTVWTALW

SEQ ID NO: 853 - protein, 9 aa, Homo sapiens
GSFGGVLQK

SEQ ID NO: 854 - protein, 8 aa, Homo sapiens
IPYAASLI

SEQ ID NO: 855 - protein, 9 aa, Homo sapiens
FLYEVFAQL

SEQ ID NO: 856 - protein, 9 aa, Homo sapiens
NASTRNVVF

SEQ ID NO: 857 - protein, 9 aa, Homo sapiens
QTQLIPVQK

SEQ ID NO: 858 - protein, 10 aa, Homo sapiens
AEDLAKAQRW

SEQ ID NO: 859 - protein, 10 aa, Homo sapiens
KSYQGQSPQK

SEQ ID NO: 860 - protein, 10 aa, Homo sapiens
LPYDGDLSQI

SEQ ID NO: 861 - protein, 9 aa, Homo sapiens
SSSSYIFQK

SEQ ID NO: 862 - protein, 9 aa, Homo sapiens
MEDESNKLW

SEQ ID NO: 863 - protein, 9 aa, Homo sapiens
IVGENSLEY

SEQ ID NO: 864 - protein, 9 aa, Homo sapiens
LPKLPIPYI

SEQ ID NO: 865 - protein, 10 aa, Homo sapiens
QEWTDYRLTW

SEQ ID NO: 866 - protein, 9 aa, Homo sapiens
DANLANTII

SEQ ID NO: 867 - protein, 8 aa, Homo sapiens
DANLANTI

SEQ ID NO: 868 - protein, 10 aa, Homo sapiens
KEGDEPITQW

SEQ ID NO: 869 - protein, 9 aa, Homo sapiens
DPMLTAAAI

SEQ ID NO: 870 - protein, 8 aa, Homo sapiens
EEFEHVGY

SEQ ID NO: 871 - protein, 8 aa, Homo sapiens
FPIPVPVI

SEQ ID NO: 872 - protein, 8 aa, Homo sapiens
NETEVIVF

SEQ ID NO: 873 - protein, 9 aa, Homo sapiens
SESQKTVTF

SEQ ID NO: 874 - protein, 9 aa, Homo sapiens
EPLSVTAKY

SEQ ID NO: 875 - protein, 9 aa, Homo sapiens
VYLPKIPSW

SEQ ID NO: 876 - protein, 8 aa, Homo sapiens
MPLLPSTV

SEQ ID NO: 877 - protein, 11 aa, Homo sapiens
NFPQFPETLSY

SEQ ID NO: 878 - protein, 9 aa, Homo sapiens
NESSLVEQM

SEQ ID NO: 879 - protein, 9 aa, Homo sapiens
KTITHIVAK

SEQ ID NO: 880 - protein, 9 aa, Homo sapiens
LVDEILEEL

SEQ ID NO: 881 - protein, 11 aa, Homo sapiens
GTQDPGLLVPK

SEQ ID NO: 882 - protein, 9 aa, Homo sapiens
EEIVLGQRL

SEQ ID NO: 883 - protein, 9 aa, Homo sapiens
EVISRVVTL

SEQ ID NO: 884 - protein, 9 aa, Homo sapiens
NTYASTLYK

SEQ ID NO: 885 - protein, 9 aa, Homo sapiens
EVISVVLKY

SEQ ID NO: 886 - protein, 9 aa, Homo sapiens
IETEFKNDY

SEQ ID NO: 887 - protein, 9 aa, Homo sapiens
IVISAYFLY

SEQ ID NO: 888 - protein, 9 aa, Homo sapiens
VMDEVQKFL

SEQ ID NO: 889 - protein, 11 aa, Homo sapiens
AFPHHPMGMLY

SEQ ID NO: 890 - protein, 10 aa, Homo sapiens
ASMSVTPVYK

SEQ ID NO: 891 - protein, 9 aa, Homo sapiens
ASMSVTPVY

SEQ ID NO: 892 - protein, 8 aa, Homo sapiens
DEVQILVF

SEQ ID NO: 893 - protein, 11 aa, Homo sapiens
DVINSIEIVSR

SEQ ID NO: 894 - protein, 11 aa, Homo sapiens
ETFSLVEGSGY

SEQ ID NO: 895 - protein, 9 aa, Homo sapiens
EYSENYILR

SEQ ID NO: 896 - protein, 9 aa, Homo sapiens
FYNSIGEKF

SEQ ID NO: 897 - protein, 11 aa, Homo sapiens
HPASMSVTPVY

SEQ ID NO: 898 - protein, 8 aa, Homo sapiens
IEIPIAMY

SEQ ID NO: 899 - protein, 9 aa, Homo sapiens
ILDDKTAMV

SEQ ID NO: 900 - protein, 9 aa, Homo sapiens
ISDNLRITY

SEQ ID NO: 901 - protein, 9 aa, Homo sapiens
IVTGVGVAR

SEQ ID NO: 902 - protein, 11 aa, Homo sapiens
IYNHPDVKETF

SEQ ID NO: 903 - protein, 9 aa, Homo sapiens
KYLESSATF

SEQ ID NO: 904 - protein, 9 aa, Homo sapiens
LPFHADVEI

SEQ ID NO: 905 - protein, 9 aa, Homo sapiens
LQTDIVTGV

SEQ ID NO: 906 - protein, 9 aa, Homo sapiens
NASLTSIIY

SEQ ID NO: 907 - protein, 9 aa, Homo sapiens
QLASAIVTL

SEQ ID NO: 908 - protein, 9 aa, Homo sapiens
QTNLVFVHK

SEQ ID NO: 909 - protein, 9 aa, Homo sapiens
QTTLVAIAK

SEQ ID NO: 910 - protein, 9 aa, Homo sapiens
SEAVVVRAM

SEQ ID NO: 911 - protein, 10 aa, Homo sapiens
SEQGVVTITY

SEQ ID NO: 912 - protein, 9 aa, Homo sapiens
SLGHTLVTV

SEQ ID NO: 913 - protein, 9 aa, Homo sapiens
STASIFLAY

SEQ ID NO: 914 - protein, 9 aa, Homo sapiens
TPMEQQDEY

SEQ ID NO: 915 - protein, 9 aa, Homo sapiens
VFEKLQLFY

SEQ ID NO: 916 - protein, 9 aa, Homo sapiens
VYVITVDVF

SEQ ID NO: 917 - protein, 9 aa, Homo sapiens
YVDDSPLEL

SEQ ID NO: 918 - protein, 9 aa, Homo sapiens
ETDALDIDY

SEQ ID NO: 919 - protein, 10 aa, Homo sapiens
GTQSTHESLK

SEQ ID NO: 920 - protein, 10 aa, Homo sapiens
QLLDGFMITL

SEQ ID NO: 921 - protein, 9 aa, Homo sapiens
KTELETALY

SEQ ID NO: 922 - protein, 9 aa, Homo sapiens
LPPSLQSSL

SEQ ID NO: 923 - protein, 10 aa, Homo sapiens
VYGDPHYVTF

SEQ ID NO: 924 - protein, 8 aa, Homo sapiens
LFWKPLRY

SEQ ID NO: 925 - protein, 9 aa, Homo sapiens
QVLVKKISQ

SEQ ID NO: 926 - protein, 9 aa, Homo sapiens
GRTVAVAEY

SEQ ID NO: 927 - protein, 9 aa, Homo sapiens
DAPSKGPSI

SEQ ID NO: 928 - protein, 9 aa, Homo sapiens
YVDNVSARV

SEQ ID NO: 929 - protein, 9 aa, Homo sapiens
VLDDGSIDY

SEQ ID NO: 930 - protein, 11 aa, Homo sapiens
AVFEAGTSVTY

SEQ ID NO: 931 - protein, 9 aa, Homo sapiens
FLIPYVIAL

SEQ ID NO: 932 - protein, 10 aa, Homo sapiens
FVSPKGVLAY

SEQ ID NO: 933 - protein, 9 aa, Homo sapiens
GQALLLAEY

SEQ ID NO: 934 - protein, 8 aa, Homo sapiens
DPYATITY

SEQ ID NO: 935 - protein, 10 aa, Homo sapiens
FFSDFGLLWY

SEQ ID NO: 936 - protein, 9 aa, Homo sapiens
FPLATQLNV

SEQ ID NO: 937 - protein, 9 aa, Homo sapiens
YTDTGLPSY

SEQ ID NO: 938 - protein, 10 aa, Homo sapiens
IYPTVDREHF

SEQ ID NO: 939 - protein, 9 aa, Homo sapiens
LLNPVIATY

SEQ ID NO: 940 - protein, 10 aa, Homo sapiens
LTDTPIPGTY

SEQ ID NO: 941 - protein, 11 aa, Homo sapiens
EVIGPDGIITV

SEQ ID NO: 942 - protein, 9 aa, Homo sapiens
NESPQTNEF

SEQ ID NO: 943 - protein, 9 aa, Homo sapiens
YFAQVKHLY

SEQ ID NO: 944 - protein, 9 aa, Homo sapiens
EANSMNTLR

SEQ ID NO: 945 - protein, 9 aa, Homo sapiens
GSDDHQYIY

SEQ ID NO: 946 - protein, 9 aa, Homo sapiens
AEVNVKGLF

SEQ ID NO: 947 - protein, 10 aa, Homo sapiens
ETSDIQEPYY

SEQ ID NO: 948 - protein, 9 aa, Homo sapiens
ASQKAIIFK

SEQ ID NO: 949 - protein, 10 aa, Homo sapiens
ITEDLVQDKY

SEQ ID NO: 950 - protein, 10 aa, Homo sapiens
KEMDSSGESY

SEQ ID NO: 951 - protein, 10 aa, Homo sapiens
ELYEGTLGKY

SEQ ID NO: 952 - protein, 8 aa, Homo sapiens
QPMHKAEL

SEQ ID NO: 953 - protein, 9 aa, Homo sapiens
IPILQKPLI

SEQ ID NO: 954 - protein, 11 aa, Homo sapiens
SEDEQNGKQKW

SEQ ID NO: 955 - protein, 9 aa, Homo sapiens
WLTPVIPAL

SEQ ID NO: 956 - protein, 10 aa, Homo sapiens
TLQSILAIVK

SEQ ID NO: 957 - protein, 9 aa, Homo sapiens
IADIVTSVF

SEQ ID NO: 958 - protein, 9 aa, Homo sapiens
NEAYIPKLL

SEQ ID NO: 959 - protein, 9 aa, Homo sapiens
TYDEQFQGM

SEQ ID NO: 960 - protein, 9 aa, Homo sapiens
DEDSIFAHY

SEQ ID NO: 961 - protein, 9 aa, Homo sapiens
ITQGNTLLR

SEQ ID NO: 962 - protein, 11 aa, Homo sapiens
WEVDVEKATRW

SEQ ID NO: 963 - protein, 9 aa, Homo sapiens
ALPNKLEEL

SEQ ID NO: 964 - protein, 9 aa, Homo sapiens
NEIFPDKKY

SEQ ID NO: 965 - protein, 9 aa, Homo sapiens
NPYFQNKVI

SEQ ID NO: 966 - protein, 9 aa, Homo sapiens
LPALLASLI

SEQ ID NO: 967 - protein, 9 aa, Homo sapiens
LLSQDILQV

SEQ ID NO: 968 - protein, 11 aa, Homo sapiens
GQHGSGSSYSY

SEQ ID NO: 969 - protein, 9 aa, Homo sapiens
AEDFKIQNW

SEQ ID NO: 970 - protein, 10 aa, Homo sapiens
EIYEILSPSY

SEQ ID NO: 971 - protein, 9 aa, Homo sapiens
EVASLQNKF

SEQ ID NO: 972 - protein, 9 aa, Homo sapiens
GTTVDILQK

SEQ ID NO: 973 - protein, 9 aa, Homo sapiens
IAAAAAAAY

SEQ ID NO: 974 - protein, 9 aa, Homo sapiens
LLPPLIPSL

SEQ ID NO: 975 - protein, 11 aa, Homo sapiens
YPYGDPHVIDY

SEQ ID NO: 976 - protein, 9 aa, Homo sapiens
YPYGDPHVI

SEQ ID NO: 977 - protein, 9 aa, Homo sapiens
RSYSPAPGK

SEQ ID NO: 978 - protein, 9 aa, Homo sapiens
AQKNTFVSY

SEQ ID NO: 979 - protein, 9 aa, Homo sapiens
TLSNTLVEL

SEQ ID NO: 980 - protein, 11 aa, Homo sapiens
RVWNMTATRPK

SEQ ID NO: 981 - protein, 9 aa, Homo sapiens
LPNTVTDAL

SEQ ID NO: 982 - protein, 11 aa, Homo sapiens
YLLGWTTFLLY

SEQ ID NO: 983 - protein, 9 aa, Homo sapiens
RIFEKYAAK

SEQ ID NO: 984 - protein, 9 aa, Homo sapiens
FPTEVTYTL

SEQ ID NO: 985 - protein, 9 aa, Homo sapiens
NPSPSSVVF

SEQ ID NO: 986 - protein, 9 aa, Homo sapiens
KVLEFVAKV

SEQ ID NO: 987 - protein, 10 aa, Homo sapiens
SSSEQSPLQK

SEQ ID NO: 988 - protein, 9 aa, Homo sapiens
SVIGGPSTY

SEQ ID NO: 989 - protein, 9 aa, Homo sapiens
EIKGTVTEF

SEQ ID NO: 990 - protein, 9 aa, Homo sapiens
LLDHVLIEM

SEQ ID NO: 991 - protein, 10 aa, Homo sapiens
STLPFQSAKY

SEQ ID NO: 992 - protein, 9 aa, Homo sapiens
EVNPTTHSY

SEQ ID NO: 993 - protein, 11 aa, Homo sapiens
AAAAAAAAATY

SEQ ID NO: 994 - protein, 9 aa, Homo sapiens
FLITGIVQV

SEQ ID NO: 995 - protein, 9 aa, Homo sapiens
ALDVEFYTL

SEQ ID NO: 996 - protein, 8 aa, Homo sapiens
IYDVSTYM

SEQ ID NO: 997 - protein, 9 aa, Homo sapiens
LAYHVQNEI

SEQ ID NO: 998 - protein, 9 aa, Homo sapiens
FTSSQVQRY

SEQ ID NO: 999 - protein, 9 aa, Homo sapiens
EVFPQSHHF

SEQ ID NO: 1000 - protein, 9 aa, Homo sapiens
SAWETITIY

SEQ ID NO: 1001 - protein, 10 aa, Homo sapiens
EIYGGHHSAF

SEQ ID NO: 1002 - protein, 10 aa, Homo sapiens
YPAPLESLDY

SEQ ID NO: 1003 - protein, 10 aa, Homo sapiens
AEVGGVFASL

SEQ ID NO: 1004 - protein, 10 aa, Homo sapiens
GVLNQPGILK

SEQ ID NO: 1005 - protein, 10 aa, Homo sapiens
LPAALSSEQM

SEQ ID NO: 1006 - protein, 9 aa, Homo sapiens
EEAQLAIRI

SEQ ID NO: 1007 - protein, 11 aa, Homo sapiens
DEADFSEHTTY

SEQ ID NO: 1008 - protein, 8 aa, Homo sapiens
SEKIVYVY

SEQ ID NO: 1009 - protein, 11 aa, Homo sapiens
ETPTSRQLSEY

SEQ ID NO: 1010 - protein, 11 aa, Homo sapiens
ASEDNLTSLLK

SEQ ID NO: 1011 - protein, 11 aa, Homo sapiens
FLYHDSTDIGL

SEQ ID NO: 1012 - protein, 9 aa, Homo sapiens
MPMSEVSQV

SEQ ID NO: 1013 - protein, 9 aa, Homo sapiens
TLTITVPAV

SEQ ID NO: 1014 - protein, 10 aa, Homo sapiens
ISNPLLIGRY

SEQ ID NO: 1015 - protein, 9 aa, Homo sapiens
KYISNPLLI

SEQ ID NO: 1016 - protein, 9 aa, Homo sapiens
VYQEGLVRF

SEQ ID NO: 1017 - protein, 9 aa, Homo sapiens
GVLGANLLY

SEQ ID NO: 1018 - protein, 9 aa, Homo sapiens
TTYTGSYRK

SEQ ID NO: 1019 - protein, 9 aa, Homo sapiens
LLDGQWHHI

SEQ ID NO: 1020 - protein, 10 aa, Homo sapiens
LPNENFQSLY

SEQ ID NO: 1021 - protein, 9 aa, Homo sapiens
TATSTGQLY

SEQ ID NO: 1022 - protein, 8 aa, Homo sapiens
MPAAAALI

SEQ ID NO: 1023 - protein, 9 aa, Homo sapiens
KYLYVTSSF

SEQ ID NO: 1024 - protein, 9 aa, Homo sapiens
MPFAISTSL

SEQ ID NO: 1025 - protein, 9 aa, Homo sapiens
EEASVYSQW

SEQ ID NO: 1026 - protein, 11 aa, Homo sapiens
RLWPEGTPIYL

SEQ ID NO: 1027 - protein, 9 aa, Homo sapiens
VLDGVKVQL

SEQ ID NO: 1028 - protein, 9 aa, Homo sapiens
VTQEVIRHK

SEQ ID NO: 1029 - protein, 9 aa, Homo sapiens
FLSDNTIEV

SEQ ID NO: 1030 - protein, 10 aa, Homo sapiens
NYNEAKFITF

SEQ ID NO: 1031 - protein, 8 aa, Homo sapiens
VEWEVHGM

SEQ ID NO: 1032 - protein, 11 aa, Homo sapiens
TTLGIDYVNPR

SEQ ID NO: 1033 - protein, 10 aa, Homo sapiens
NYTDFSGSSF

SEQ ID NO: 1034 - protein, 9 aa, Homo sapiens
YEAFLSPEY

SEQ ID NO: 1035 - protein, 9 aa, Homo sapiens
ALAAVDIAV

SEQ ID NO: 1036 - protein, 8 aa, Homo sapiens
DENLIYVI

SEQ ID NO: 1037 - protein, 11 aa, Homo sapiens
AVHNEDKLMAK

SEQ ID NO: 1038 - protein, 9 aa, Homo sapiens
AVKKPFDLR

SEQ ID NO: 1039 - protein, 10 aa, Homo sapiens
DEYGNTTLHY

SEQ ID NO: 1040 - protein, 10 aa, Homo sapiens
ISQDEILTNK

SEQ ID NO: 1041 - protein, 8 aa, Homo sapiens
LEEEVTTY

SEQ ID NO: 1042 - protein, 9 aa, Homo sapiens
LVDNLITSL

SEQ ID NO: 1043 - protein, 9 aa, Homo sapiens
AAVSDPRVY

SEQ ID NO: 1044 - protein, 9 aa, Homo sapiens
ATLENLLSH

SEQ ID NO: 1045 - protein, 9 aa, Homo sapiens
TVNKLNHAY

SEQ ID NO: 1046 - protein, 9 aa, Homo sapiens
QSEQSSVRY

SEQ ID NO: 1047 - protein, 9 aa, Homo sapiens
ILSPIEETY

SEQ ID NO: 1048 - protein, 9 aa, Homo sapiens
GLLSDLVYL

SEQ ID NO: 1049 - protein, 9 aa, Homo sapiens
GTNGFQLLR

SEQ ID NO: 1050 - protein, 11 aa, Homo sapiens
LLPPRTPPYQV

SEQ ID NO: 1051 - protein, 9 aa, Homo sapiens
VPPGIRNTI

SEQ ID NO: 1052 - protein, 9 aa, Homo sapiens
VPSYPGNTY

SEQ ID NO: 1053 - protein, 10 aa, Homo sapiens
RLLPPVSGGY

SEQ ID NO: 1054 - protein, 8 aa, Homo sapiens
YPISPKVI

SEQ ID NO: 1055 - protein, 9 aa, Homo sapiens
DAWLFGALV

SEQ ID NO: 1056 - protein, 9 aa, Homo sapiens
DVATFAAGY

SEQ ID NO: 1057 - protein, 9 aa, Homo sapiens
QLWGHTIQV

SEQ ID NO: 1058 - protein, 9 aa, Homo sapiens
SLSPVSATL

SEQ ID NO: 1059 - protein, 9 aa, Homo sapiens
DLVQRNVSI

SEQ ID NO: 1060 - protein, 10 aa, Homo sapiens
GSIDDGNFQK

SEQ ID NO: 1061 - protein, 9 aa, Homo sapiens
KAMAHLIQK

SEQ ID NO: 1062 - protein, 11 aa, Homo sapiens
RLSAESKDLLK

SEQ ID NO: 1063 - protein, 9 aa, Homo sapiens
QPLLHVTAY

SEQ ID NO: 1064 - protein, 9 aa, Homo sapiens
ALDNIVTQF

SEQ ID NO: 1065 - protein, 9 aa, Homo sapiens
FLDSQITTV

SEQ ID NO: 1066 - protein, 9 aa, Homo sapiens
SSSGLSSSY

SEQ ID NO: 1067 - protein, 8 aa, Homo sapiens
LPPLIPSL

SEQ ID NO: 1068 - protein, 9 aa, Homo sapiens
DALKQSLVV

SEQ ID NO: 1069 - protein, 10 aa, Homo sapiens
EEVQAFLQTY

SEQ ID NO: 1070 - protein, 9 aa, Homo sapiens
GTMGLSARY

SEQ ID NO: 1071 - protein, 9 aa, Homo sapiens
YLVTKVVAV

SEQ ID NO: 1072 - protein, 9 aa, Homo sapiens
IPPSFVKMV

SEQ ID NO: 1073 - protein, 9 aa, Homo sapiens
RLGPLTTSH

SEQ ID NO: 1074 - protein, 11 aa, Homo sapiens
VTDTLVEVLLY

SEQ ID NO: 1075 - protein, 9 aa, Homo sapiens
EYAGNFQGI

SEQ ID NO: 1076 - protein, 9 aa, Homo sapiens
DSYVFVNTL

SEQ ID NO: 1077 - protein, 9 aa, Homo sapiens
LYLPEPFKI

SEQ ID NO: 1078 - protein, 9 aa, Homo sapiens
YLPEPFKIA

SEQ ID NO: 1079 - protein, 9 aa, Homo sapiens
MVILGVTSF

SEQ ID NO: 1080 - protein, 8 aa, Homo sapiens
MPAVKNVI

SEQ ID NO: 1081 - protein, 9 aa, Homo sapiens
LLSLVGFVY

SEQ ID NO: 1082 - protein, 9 aa, Homo sapiens
AELTGGSEW

SEQ ID NO: 1083 - protein, 11 aa, Homo sapiens
IFIIITDLSLY

SEQ ID NO: 1084 - protein, 9 aa, Homo sapiens
SAINPVLYY

SEQ ID NO: 1085 - protein, 10 aa, Homo sapiens
RVAELINASY

SEQ ID NO: 1086 - protein, 9 aa, Homo sapiens
TAASSDIEM

SEQ ID NO: 1087 - protein, 8 aa, Homo sapiens
NEYFSTKY

SEQ ID NO: 1088 - protein, 8 aa, Homo sapiens
DTNIIANR

SEQ ID NO: 1089 - protein, 11 aa, Homo sapiens
QVASQEDILLK

SEQ ID NO: 1090 - protein, 11 aa, Homo sapiens
VSDSTYYSSFY

SEQ ID NO: 1091 - protein, 9 aa, Homo sapiens
FLGPATAHL

SEQ ID NO: 1092 - protein, 9 aa, Homo sapiens
IYSVRVVNF

SEQ ID NO: 1093 - protein, 11 aa, Homo sapiens
RVLPWADRTAR

SEQ ID NO: 1094 - protein, 9 aa, Homo sapiens
NPLGDIASL

SEQ ID NO: 1095 - protein, 8 aa, Homo sapiens
FPYVVLVI

SEQ ID NO: 1096 - protein, 9 aa, Homo sapiens
GLPIFFLEV

SEQ ID NO: 1097 - protein, 9 aa, Homo sapiens
TAYPNVTMV

SEQ ID NO: 1098 - protein, 8 aa, Homo sapiens
WAFVTPTI

SEQ ID NO: 1099 - protein, 11 aa, Homo sapiens
QTLEELNTVLK

SEQ ID NO: 1100 - protein, 9 aa, Homo sapiens
RNLPPPLYY

SEQ ID NO: 1101 - protein, 9 aa, Homo sapiens
FPTGAILTL

SEQ ID NO: 1102 - protein, 10 aa, Homo sapiens
NEQESLLSRY

SEQ ID NO: 1103 - protein, 8 aa, Homo sapiens
DALLAQKV

SEQ ID NO: 1104 - protein, 10 aa, Homo sapiens
SESDLKHLSW

SEQ ID NO: 1105 - protein, 10 aa, Homo sapiens
ASQVPSHSPK

SEQ ID NO: 1106 - protein, 9 aa, Homo sapiens
LRNQLDQQF

SEQ ID NO: 1107 - protein, 9 aa, Homo sapiens
ALADFMLSL

SEQ ID NO: 1108 - protein, 9 aa, Homo sapiens
YITFVFLSY

SEQ ID NO: 1109 - protein, 9 aa, Homo sapiens
STSTVPLAH

SEQ ID NO: 1110 - protein, 9 aa, Homo sapiens
AVAVWVHVR

SEQ ID NO: 1111 - protein, 10 aa, Homo sapiens
SYLDLLTLSY

SEQ ID NO: 1112 - protein, 9 aa, Homo sapiens
YLDLLTLSY

SEQ ID NO: 1113 - protein, 9 aa, Homo sapiens
NYAPPVVKF

SEQ ID NO: 1114 - protein, 9 aa, Homo sapiens
GLPWRFEEL

SEQ ID NO: 1115 - protein, 9 aa, Homo sapiens
EVIAGLERF

SEQ ID NO: 1116 - protein, 9 aa, Homo sapiens
FAFEKDVEM

SEQ ID NO: 1117 - protein, 11 aa, Homo sapiens
EVASAVSAFGY

SEQ ID NO: 1118 - protein, 10 aa, Homo sapiens
IFSAINPVLY

SEQ ID NO: 1119 - protein, 10 aa, Homo sapiens
EVYDEDPFAY

SEQ ID NO: 1120 - protein, 8 aa, Homo sapiens
TENIVAVM

SEQ ID NO: 1121 - protein, 8 aa, Homo sapiens
NENSLVSF

SEQ ID NO: 1122 - protein, 9 aa, Homo sapiens
VQDDTLHNV

SEQ ID NO: 1123 - protein, 9 aa, Homo sapiens
YSHVQGISY

SEQ ID NO: 1124 - protein, 9 aa, Homo sapiens
ESAGVMSVY

SEQ ID NO: 1125 - protein, 9 aa, Homo sapiens
EPYLEGISY

SEQ ID NO: 1126 - protein, 9 aa, Homo sapiens
SASGPGLAF

SEQ ID NO: 1127 - protein, 9 aa, Homo sapiens
ILDVIGVKV

SEQ ID NO: 1128 - protein, 10 aa, Homo sapiens
STLTVDIANK

SEQ ID NO: 1129 - protein, 9 aa, Homo sapiens
VVTGHQQSF

SEQ ID NO: 1130 - protein, 11 aa, Homo sapiens
QEVVGELVAKF

SEQ ID NO: 1131 - protein, 9 aa, Homo sapiens
LPGPQQQAF

SEQ ID NO: 1132 - protein, 10 aa, Homo sapiens
AENESVIIRL

SEQ ID NO: 1133 - protein, 9 aa, Homo sapiens
AILLQVIAK

SEQ ID NO: 1134 - protein, 9 aa, Homo sapiens
ALLGQVVYA

SEQ ID NO: 1135 - protein, 9 aa, Homo sapiens
AVITEINGY

SEQ ID NO: 1136 - protein, 9 aa, Homo sapiens
DARIFQLSI

SEQ ID NO: 1137 - protein, 9 aa, Homo sapiens
DPYEIGQTA

SEQ ID NO: 1138 - protein, 11 aa, Homo sapiens
DVISLMLQAGY

SEQ ID NO: 1139 - protein, 9 aa, Homo sapiens
EEVYISHIY

SEQ ID NO: 1140 - protein, 9 aa, Homo sapiens
EVDIVFVDY

SEQ ID NO: 1141 - protein, 8 aa, Homo sapiens
FEVEFIDY

SEQ ID NO: 1142 - protein, 11 aa, Homo sapiens
GSMNSNQQLFK

SEQ ID NO: 1143 - protein, 9 aa, Homo sapiens
IPTDSSSEF

SEQ ID NO: 1144 - protein, 10 aa, Homo sapiens
KEVDIVFVDY

SEQ ID NO: 1145 - protein, 9 aa, Homo sapiens
KTVDYFTSK

SEQ ID NO: 1146 - protein, 10 aa, Homo sapiens
KYVDDKVLVF

SEQ ID NO: 1147 - protein, 9 aa, Homo sapiens
LPKSLAVNI

SEQ ID NO: 1148 - protein, 11 aa, Homo sapiens
PTDSSSEFQVY

SEQ ID NO: 1149 - protein, 9 aa, Homo sapiens
QALLGQVVY

SEQ ID NO: 1150 - protein, 10 aa, Homo sapiens
QTQESTVNSK

SEQ ID NO: 1151 - protein, 9 aa, Homo sapiens
QYITLSETF

SEQ ID NO: 1152 - protein, 9 aa, Homo sapiens
RLAEIVYNI

SEQ ID NO: 1153 - protein, 9 aa, Homo sapiens
SAKEFLMNR

SEQ ID NO: 1154 - protein, 9 aa, Homo sapiens
SEFKNPFTL

SEQ ID NO: 1155 - protein, 11 aa, Homo sapiens
SETSVSDVNSF

SEQ ID NO: 1156 - protein, 9 aa, Homo sapiens
SLNKKGILK

SEQ ID NO: 1157 - protein, 9 aa, Homo sapiens
SVNLQNFPK

SEQ ID NO: 1158 - protein, 10 aa, Homo sapiens
VINKPSPVTY

SEQ ID NO: 1159 - protein, 9 aa, Homo sapiens
VLDKLQPSL

SEQ ID NO: 1160 - protein, 9 aa, Homo sapiens
YGFSFYIRY

SEQ ID NO: 1161 - protein, 9 aa, Homo sapiens
YINEKIKVL

SEQ ID NO: 1162 - protein, 10 aa, Homo sapiens
YVDDKVLVFL

SEQ ID NO: 1163 - protein, 9 aa, Homo sapiens
YVDDKVLVF

SEQ ID NO: 1164 - protein, 10 aa, Homo sapiens
ATLQPRGITR

SEQ ID NO: 1165 - protein, 9 aa, Homo sapiens
YLHEQVKTI

SEQ ID NO: 1166 - protein, 9 aa, Homo sapiens
QEHLVIAEM

SEQ ID NO: 1167 - protein, 9 aa, Homo sapiens
AAASLFEVY

SEQ ID NO: 1168 - protein, 9 aa, Homo sapiens
ATIAVVVVY

SEQ ID NO: 1169 - protein, 10 aa, Homo sapiens
HAAASLFEVY

SEQ ID NO: 1170 - protein, 8 aa, Homo sapiens
LPYSILAI

SEQ ID NO: 1171 - protein, 10 aa, Homo sapiens
ASLDSITHRY

SEQ ID NO: 1172 - protein, 10 aa, Homo sapiens
ASNRSLPAKY

SEQ ID NO: 1173 - protein, 10 aa, Homo sapiens
TPDPPTIISY

SEQ ID NO: 1174 - protein, 11 aa, Homo sapiens
ALYPALPKSGK

SEQ ID NO: 1175 - protein, 11 aa, Homo sapiens
DVFSPSHKTTR

SEQ ID NO: 1176 - protein, 9 aa, Homo sapiens
DYYPSSSER

SEQ ID NO: 1177 - protein, 11 aa, Homo sapiens
ILMEEGGIYSL

SEQ ID NO: 1178 - protein, 10 aa, Homo sapiens
STDEIRQSDY

SEQ ID NO: 1179 - protein, 9 aa, Homo sapiens
TLFERLNSL

SEQ ID NO: 1180 - protein, 9 aa, Homo sapiens
NYSPVTGKF

SEQ ID NO: 1181 - protein, 9 aa, Homo sapiens
TLDPADFFL

SEQ ID NO: 1182 - protein, 9 aa, Homo sapiens
AEIAINVHL

SEQ ID NO: 1183 - protein, 10 aa, Homo sapiens
AEYTGAQQKL

SEQ ID NO: 1184 - protein, 10 aa, Homo sapiens
AINVHLSTLK

SEQ ID NO: 1185 - protein, 9 aa, Homo sapiens
DENEVATSM

SEQ ID NO: 1186 - protein, 9 aa, Homo sapiens
FSDLQKGYY

SEQ ID NO: 1187 - protein, 9 aa, Homo sapiens
MEVDVQEKL

SEQ ID NO: 1188 - protein, 9 aa, Homo sapiens
VADDGVTQY

SEQ ID NO: 1189 - protein, 10 aa, Homo sapiens
VLDPAGDWYY

SEQ ID NO: 1190 - protein, 9 aa, Homo sapiens
YPNITDPEY

SEQ ID NO: 1191 - protein, 9 aa, Homo sapiens
AFLTSTLLF

SEQ ID NO: 1192 - protein, 8 aa, Homo sapiens
DEYYTITL

SEQ ID NO: 1193 - protein, 8 aa, Homo sapiens
TEVEIQAF

SEQ ID NO: 1194 - protein, 9 aa, Homo sapiens
YENVAKVGF

SEQ ID NO: 1195 - protein, 9 aa, Homo sapiens
ATEVSTWFY

SEQ ID NO: 1196 - protein, 9 aa, Homo sapiens
NLVEKTPAL

SEQ ID NO: 1197 - protein, 11 aa, Homo sapiens
TPALVNAAVTY

SEQ ID NO: 1198 - protein, 9 aa, Homo sapiens
ALDGISQVL

SEQ ID NO: 1199 - protein, 9 aa, Homo sapiens
DAYPEIEKF

SEQ ID NO: 1200 - protein, 9 aa, Homo sapiens
EEGELEKLF

SEQ ID NO: 1201 - protein, 11 aa, Homo sapiens
KTYDAPSALPK

SEQ ID NO: 1202 - protein, 10 aa, Homo sapiens
SVYVGDALLY

SEQ ID NO: 1203 - protein, 9 aa, Homo sapiens
EMFPKFTEV

SEQ ID NO: 1204 - protein, 9 aa, Homo sapiens
AVVDGIQYK

SEQ ID NO: 1205 - protein, 9 aa, Homo sapiens
DTHAVVTAR

SEQ ID NO: 1206 - protein, 10 aa, Homo sapiens
EVVAIGTGEY

SEQ ID NO: 1207 - protein, 9 aa, Homo sapiens
ISNPVLPPK

SEQ ID NO: 1208 - protein, 10 aa, Homo sapiens
SISNPVLPPK

SEQ ID NO: 1209 - protein, 9 aa, Homo sapiens
SLAAFIIER

SEQ ID NO: 1210 - protein, 9 aa, Homo sapiens
HAGPNVYKF

SEQ ID NO: 1211 - protein, 10 aa, Homo sapiens
AESDVTRFLF

SEQ ID NO: 1212 - protein, 9 aa, Homo sapiens
AESDVTRFL

SEQ ID NO: 1213 - protein, 9 aa, Homo sapiens
QVKTWFQNR

SEQ ID NO: 1214 - protein, 9 aa, Homo sapiens
YPLMPTPTL

SEQ ID NO: 1215 - protein, 9 aa, Homo sapiens
EEETLKTLY

SEQ ID NO: 1216 - protein, 8 aa, Homo sapiens
IADEAVKL

SEQ ID NO: 1217 - protein, 11 aa, Homo sapiens
KQKFGEITDTY

SEQ ID NO: 1218 - protein, 11 aa, Homo sapiens
KVLGEKETLLY

SEQ ID NO: 1219 - protein, 10 aa, Homo sapiens
SEEETLKTLY

SEQ ID NO: 1220 - protein, 9 aa, Homo sapiens
TAITTSEQY

SEQ ID NO: 1221 - protein, 9 aa, Homo sapiens
TSVDHGISK

SEQ ID NO: 1222 - protein, 9 aa, Homo sapiens
TTSEQYYSK

SEQ ID NO: 1223 - protein, 11 aa, Homo sapiens
VSEEETLKTLY

SEQ ID NO: 1224 - protein, 8 aa, Homo sapiens
DAPKEINI

SEQ ID NO: 1225 - protein, 9 aa, Homo sapiens
GLDAFRIFL

SEQ ID NO: 1226 - protein, 8 aa, Homo sapiens
LPIEGQEI

SEQ ID NO: 1227 - protein, 9 aa, Homo sapiens
LYIGATGQF

SEQ ID NO: 1228 - protein, 9 aa, Homo sapiens
FTDEGDQLF

SEQ ID NO: 1229 - protein, 9 aa, Homo sapiens
GLHGLGLLY

SEQ ID NO: 1230 - protein, 9 aa, Homo sapiens
LYIKSLPTF

SEQ ID NO: 1231 - protein, 9 aa, Homo sapiens
NALGFLSSY

SEQ ID NO: 1232 - protein, 8 aa, Homo sapiens
TEDIGPQF

SEQ ID NO: 1233 - protein, 9 aa, Homo sapiens
HGDAHLQEY

SEQ ID NO: 1234 - protein, 9 aa, Homo sapiens
STKPDMIQK

SEQ ID NO: 1235 - protein, 11 aa, Homo sapiens
QPLQPSSPVAY

SEQ ID NO: 1236 - protein, 8 aa, Homo sapiens
SLGPVVQV

SEQ ID NO: 1237 - protein, 9 aa, Homo sapiens
AVSISTVGY

SEQ ID NO: 1238 - protein, 10 aa, Homo sapiens
EEEQLQQARW

SEQ ID NO: 1239 - protein, 9 aa, Homo sapiens
EEQLQQARW

SEQ ID NO: 1240 - protein, 10 aa, Homo sapiens
FPVQATIDFY

SEQ ID NO: 1241 - protein, 8 aa, Homo sapiens
LEQLVLMY

SEQ ID NO: 1242 - protein, 10 aa, Homo sapiens
HVAGEQMAEY

SEQ ID NO: 1243 - protein, 8 aa, Homo sapiens
TEMQMEEY

SEQ ID NO: 1244 - protein, 9 aa, Homo sapiens
VTEMQMEEY

SEQ ID NO: 1245 - protein, 8 aa, Homo sapiens
MEFKAVIY

SEQ ID NO: 1246 - protein, 9 aa, Homo sapiens
YYLNDLDRI

SEQ ID NO: 1247 - protein, 9 aa, Homo sapiens
RYILENHDF

SEQ ID NO: 1248 - protein, 10 aa, Homo sapiens
TLQEGITGVY

SEQ ID NO: 1249 - protein, 9 aa, Homo sapiens
TLQEGITGV

SEQ ID NO: 1250 - protein, 9 aa, Homo sapiens
EYGNIPVVR

SEQ ID NO: 1251 - protein, 10 aa, Homo sapiens
GIADPNQSAK

SEQ ID NO: 1252 - protein, 11 aa, Homo sapiens
ATLELNETQVK

SEQ ID NO: 1253 - protein, 9 aa, Homo sapiens
SINKSGASY

SEQ ID NO: 1254 - protein, 9 aa, Homo sapiens
FPIVGDVAL

SEQ ID NO: 1255 - protein, 11 aa, Homo sapiens
MLDDIPEDNTL

SEQ ID NO: 1256 - protein, 9 aa, Homo sapiens
AAFVSSRVL

SEQ ID NO: 1257 - protein, 9 aa, Homo sapiens
ATGSANMTK

SEQ ID NO: 1258 - protein, 10 aa, Homo sapiens
GVQTFTSGKY

SEQ ID NO: 1259 - protein, 9 aa, Homo sapiens
MPQPLNPEL

SEQ ID NO: 1260 - protein, 10 aa, Homo sapiens
SSQPSPSDPK

SEQ ID NO: 1261 - protein, 11 aa, Homo sapiens
ILLDPVQRNLY

SEQ ID NO: 1262 - protein, 11 aa, Homo sapiens
AGESGKSTIVK

SEQ ID NO: 1263 - protein, 9 aa, Homo sapiens
EIIIYGPAY

SEQ ID NO: 1264 - protein, 9 aa, Homo sapiens
EYLTQAAFF

SEQ ID NO: 1265 - protein, 9 aa, Homo sapiens
SIDQIYKKL

SEQ ID NO: 1266 - protein, 11 aa, Homo sapiens
IVVDKSDLIPK

SEQ ID NO: 1267 - protein, 11 aa, Homo sapiens
NYPETLKFMLI

SEQ ID NO: 1268 - protein, 9 aa, Homo sapiens
STLKFIGQY

SEQ ID NO: 1269 - protein, 8 aa, Homo sapiens
DAPIIKEI

SEQ ID NO: 1270 - protein, 9 aa, Homo sapiens
EGNPLLLTV

SEQ ID NO: 1271 - protein, 11 aa, Homo sapiens
FLEGNPLLLTV

SEQ ID NO: 1272 - protein, 9 aa, Homo sapiens
GFWSDTILY

SEQ ID NO: 1273 - protein, 10 aa, Homo sapiens
QEMQNSKENF

SEQ ID NO: 1274 - protein, 11 aa, Homo sapiens
SYLTGSAGEEL

SEQ ID NO: 1275 - protein, 9 aa, Homo sapiens
VFADFFNTF

SEQ ID NO: 1276 - protein, 9 aa, Homo sapiens
SEQMSRTNY

SEQ ID NO: 1277 - protein, 10 aa, Homo sapiens
MEFSGENRGY

SEQ ID NO: 1278 - protein, 9 aa, Homo sapiens
HPQLRKVTL

SEQ ID NO: 1279 - protein, 9 aa, Homo sapiens
AEAPLSQRW

SEQ ID NO: 1280 - protein, 8 aa, Homo sapiens
VEAPVSTF

SEQ ID NO: 1281 - protein, 11 aa, Homo sapiens
VSEPIADQSNY

SEQ ID NO: 1282 - protein, 9 aa, Homo sapiens
YLDSFADGL

SEQ ID NO: 1283 - protein, 10 aa, Homo sapiens
LLFDKEPINV

SEQ ID NO: 1284 - protein, 9 aa, Homo sapiens
YFSHHLAVY

SEQ ID NO: 1285 - protein, 11 aa, Homo sapiens
SEYQLNDSAAY

SEQ ID NO: 1286 - protein, 9 aa, Homo sapiens
DDVIISSGY

SEQ ID NO: 1287 - protein, 9 aa, Homo sapiens
LVASGLATY

SEQ ID NO: 1288 - protein, 9 aa, Homo sapiens
SENIDVISL

SEQ ID NO: 1289 - protein, 9 aa, Homo sapiens
TFPSLFSLY

SEQ ID NO: 1290 - protein, 9 aa, Homo sapiens
EEITLRENF

SEQ ID NO: 1291 - protein, 9 aa, Homo sapiens
EENIETERW

SEQ ID NO: 1292 - protein, 9 aa, Homo sapiens
NAIDVSEHF

SEQ ID NO: 1293 - protein, 9 aa, Homo sapiens
NAITLPEEF

SEQ ID NO: 1294 - protein, 9 aa, Homo sapiens
PYADIIATM

SEQ ID NO: 1295 - protein, 9 aa, Homo sapiens
DEKLTVTSL

SEQ ID NO: 1296 - protein, 9 aa, Homo sapiens
LPDKVFIKY

SEQ ID NO: 1297 - protein, 9 aa, Homo sapiens
AVADTLIGV

SEQ ID NO: 1298 - protein, 9 aa, Homo sapiens
ASLDSITHR

SEQ ID NO: 1299 - protein, 9 aa, Homo sapiens
YLPGLLYKF

SEQ ID NO: 1300 - protein, 9 aa, Homo sapiens
TSLDMTHPY

SEQ ID NO: 1301 - protein, 9 aa, Homo sapiens
DEHTGIHTM

SEQ ID NO: 1302 - protein, 9 aa, Homo sapiens
MLDALLVHI

SEQ ID NO: 1303 - protein, 9 aa, Homo sapiens
ASSAPTAEK

SEQ ID NO: 1304 - protein, 10 aa, Homo sapiens
EETQILRDTF

SEQ ID NO: 1305 - protein, 10 aa, Homo sapiens
KVAQVPFTTK

SEQ ID NO: 1306 - protein, 10 aa, Homo sapiens
STSSYPIAEK

SEQ ID NO: 1307 - protein, 9 aa, Homo sapiens
VLKDVQRSY

SEQ ID NO: 1308 - protein, 9 aa, Homo sapiens
VSEAKPSQY

SEQ ID NO: 1309 - protein, 9 aa, Homo sapiens
LLPSWVPEV

SEQ ID NO: 1310 - protein, 9 aa, Homo sapiens
STVFDPVFK

SEQ ID NO: 1311 - protein, 11 aa, Homo sapiens
IFSAINPVLYY

SEQ ID NO: 1312 - protein, 9 aa, Homo sapiens
VTTYPISPK

SEQ ID NO: 1313 - protein, 9 aa, Homo sapiens
LFLFGVTKY

SEQ ID NO: 1314 - protein, 9 aa, Homo sapiens
QVPGGSQEL

SEQ ID NO: 1315 - protein, 10 aa, Homo sapiens
AYAERLGVTF

SEQ ID NO: 1316 - protein, 9 aa, Homo sapiens
GAQGVILVY

SEQ ID NO: 1317 - protein, 8 aa, Homo sapiens
HAPGVPKI

SEQ ID NO: 1318 - protein, 9 aa, Homo sapiens
NIIESFTEL

SEQ ID NO: 1319 - protein, 11 aa, Homo sapiens
QAYAERLGVTF

SEQ ID NO: 1320 - protein, 9 aa, Homo sapiens
APANIQVSF

SEQ ID NO: 1321 - protein, 8 aa, Homo sapiens
DAFSMINV

SEQ ID NO: 1322 - protein, 9 aa, Homo sapiens
DTKYNITVY

SEQ ID NO: 1323 - protein, 11 aa, Homo sapiens
GQSPLGDIFNY

SEQ ID NO: 1324 - protein, 9 aa, Homo sapiens
TVMVSPVAK

SEQ ID NO: 1325 - protein, 9 aa, Homo sapiens
VSPVAKTGL

SEQ ID NO: 1326 - protein, 9 aa, Homo sapiens
SAAASVLTV

SEQ ID NO: 1327 - protein, 11 aa, Homo sapiens
AFIIKTIGQLY

SEQ ID NO: 1328 - protein, 9 aa, Homo sapiens
DAMTAFESI

SEQ ID NO: 1329 - protein, 9 aa, Homo sapiens
EESSINYTF

SEQ ID NO: 1330 - protein, 11 aa, Homo sapiens
HFDESTTGSNF

SEQ ID NO: 1331 - protein, 11 aa, Homo sapiens
KLFPGSPAIYK

SEQ ID NO: 1332 - protein, 8 aa, Homo sapiens
NEQVVFSH

SEQ ID NO: 1333 - protein, 9 aa, Homo sapiens
SQYGKMANK

SEQ ID NO: 1334 - protein, 11 aa, Homo sapiens
SVQGSAPSPRK

SEQ ID NO: 1335 - protein, 9 aa, Homo sapiens
TAFESIKSV

SEQ ID NO: 1336 - protein, 9 aa, Homo sapiens
VVVETFANK

SEQ ID NO: 1337 - protein, 9 aa, Homo sapiens
SEIDQGKGY

SEQ ID NO: 1338 - protein, 10 aa, Homo sapiens
EVVVALILQY

SEQ ID NO: 1339 - protein, 9 aa, Homo sapiens
TAYLWIRQI

SEQ ID NO: 1340 - protein, 9 aa, Homo sapiens
SSEDLHVFY

SEQ ID NO: 1341 - protein, 9 aa, Homo sapiens
VAHLELATY

SEQ ID NO: 1342 - protein, 9 aa, Homo sapiens
ATGWGLVSK

SEQ ID NO: 1343 - protein, 10 aa, Homo sapiens
GSSSGLSSSY

SEQ ID NO: 1344 - protein, 9 aa, Homo sapiens
NAGPLNVLY

SEQ ID NO: 1345 - protein, 10 aa, Homo sapiens
ATSPPTPGHY

SEQ ID NO: 1346 - protein, 9 aa, Homo sapiens
DEMGVVGYF

SEQ ID NO: 1347 - protein, 9 aa, Homo sapiens
AAPLAAGAL

SEQ ID NO: 1348 - protein, 9 aa, Homo sapiens
AEQLVKTGW

SEQ ID NO: 1349 - protein, 9 aa, Homo sapiens
SEGEGKELW

SEQ ID NO: 1350 - protein, 11 aa, Homo sapiens
RLYQTDPSGTY

SEQ ID NO: 1351 - protein, 9 aa, Homo sapiens
ELQGPWHTR

SEQ ID NO: 1352 - protein, 9 aa, Homo sapiens
GIFPKIMPK

SEQ ID NO: 1353 - protein, 11 aa, Homo sapiens
SVFDEKQQWKF

SEQ ID NO: 1354 - protein, 11 aa, Homo sapiens
VSDPAKIAIHY

SEQ ID NO: 1355 - protein, 9 aa, Homo sapiens
SLVNLQPEL

SEQ ID NO: 1356 - protein, 9 aa, Homo sapiens
SPLEVPQSF

SEQ ID NO: 1357 - protein, 9 aa, Homo sapiens
TLDEYLTYL

SEQ ID NO: 1358 - protein, 9 aa, Homo sapiens
DGYYRGIVV

SEQ ID NO: 1359 - protein, 9 aa, Homo sapiens
IAPDNVHVI

SEQ ID NO: 1360 - protein, 8 aa, Homo sapiens
DVVAKTSL

SEQ ID NO: 1361 - protein, 10 aa, Homo sapiens
GEIIIYGPAY

SEQ ID NO: 1362 - protein, 9 aa, Homo sapiens
HPTLGPSAF

SEQ ID NO: 1363 - protein, 10 aa, Homo sapiens
DYRDKSPQNR

SEQ ID NO: 1364 - protein, 9 aa, Homo sapiens
SLLNGFVAV

SEQ ID NO: 1365 - protein, 8 aa, Homo sapiens
AEVLAQSF

SEQ ID NO: 1366 - protein, 11 aa, Homo sapiens
EVFNEDGTVRY

SEQ ID NO: 1367 - protein, 11 aa, Homo sapiens
EVITSDILHSF

SEQ ID NO: 1368 - protein, 10 aa, Homo sapiens
EVVQIGTSIF

SEQ ID NO: 1369 - protein, 11 aa, Homo sapiens
SVLPAEALVLK

SEQ ID NO: 1370 - protein, 10 aa, Homo sapiens
TSDILHSFLY

SEQ ID NO: 1371 - protein, 9 aa, Homo sapiens
RTMVFVETK

SEQ ID NO: 1372 - protein, 9 aa, Homo sapiens
REVLPLATF

SEQ ID NO: 1373 - protein, 9 aa, Homo sapiens
ETTGKVIYF

SEQ ID NO: 1374 - protein, 9 aa, Homo sapiens
DSVPLIAQY

SEQ ID NO: 1375 - protein, 9 aa, Homo sapiens
AEAALQTLL

SEQ ID NO: 1376 - protein, 10 aa, Homo sapiens
AEDQGFQFSY

SEQ ID NO: 1377 - protein, 8 aa, Homo sapiens
DEFVVLAL

SEQ ID NO: 1378 - protein, 9 aa, Homo sapiens
EAISQIASF

SEQ ID NO: 1379 - protein, 9 aa, Homo sapiens
EVISMGTSV

SEQ ID NO: 1380 - protein, 11 aa, Homo sapiens
HLWDPNPKIGV

SEQ ID NO: 1381 - protein, 9 aa, Homo sapiens
HMDTVVVNL

SEQ ID NO: 1382 - protein, 10 aa, Homo sapiens
ILDDAIVQRL

SEQ ID NO: 1383 - protein, 9 aa, Homo sapiens
IVMGDLSTK

SEQ ID NO: 1384 - protein, 9 aa, Homo sapiens
LTDRDVSFY

SEQ ID NO: 1385 - protein, 9 aa, Homo sapiens
DEIFNTEAM

SEQ ID NO: 1386 - protein, 10 aa, Homo sapiens
SEVEEPLTVW

SEQ ID NO: 1387 - protein, 10 aa, Homo sapiens
LLWERIELYL

SEQ ID NO: 1388 - protein, 9 aa, Homo sapiens
EMYAIYQQR

SEQ ID NO: 1389 - protein, 9 aa, Homo sapiens
GLLEISQQL

SEQ ID NO: 1390 - protein, 9 aa, Homo sapiens
VLITAVVEV

SEQ ID NO: 1391 - protein, 9 aa, Homo sapiens
FMDFLQTLL

SEQ ID NO: 1392 - protein, 9 aa, Homo sapiens
EAPGLGGTY

SEQ ID NO: 1393 - protein, 9 aa, Homo sapiens
MPVPGQQSM

SEQ ID NO: 1394 - protein, 9 aa, Homo sapiens
AESEGTKAV

SEQ ID NO: 1395 - protein, 11 aa, Homo sapiens
RVVPPASNMLK

SEQ ID NO: 1396 - protein, 11 aa, Homo sapiens
TTDDDITTDHY

SEQ ID NO: 1397 - protein, 9 aa, Homo sapiens
VVPPASNML

SEQ ID NO: 1398 - protein, 9 aa, Homo sapiens
YPVSWSSVI

SEQ ID NO: 1399 - protein, 11 aa, Homo sapiens
ATQNAVKLIDK

SEQ ID NO: 1400 - protein, 9 aa, Homo sapiens
DTDMKYLLY

SEQ ID NO: 1401 - protein, 9 aa, Homo sapiens
EYKNVGSER

SEQ ID NO: 1402 - protein, 11 aa, Homo sapiens
GTEFGDTDMKY

SEQ ID NO: 1403 - protein, 10 aa, Homo sapiens
TEFGDTDMKY

SEQ ID NO: 1404 - protein, 10 aa, Homo sapiens
KEVDPAGHSY

SEQ ID NO: 1405 - protein, 9 aa, Homo sapiens
IVFSEEFEY

SEQ ID NO: 1406 - protein, 8 aa, Homo sapiens
DVKMKAVM

SEQ ID NO: 1407 - protein, 9 aa, Homo sapiens
YLYPFNIEY

SEQ ID NO: 1408 - protein, 11 aa, Homo sapiens
SSISNPVLPPK

SEQ ID NO: 1409 - protein, 10 aa, Homo sapiens
FPFTYKGSVY

SEQ ID NO: 1410 - protein, 9 aa, Homo sapiens
DENGQSASY

SEQ ID NO: 1411 - protein, 10 aa, Homo sapiens
AEVELIDQTL

SEQ ID NO: 1412 - protein, 9 aa, Homo sapiens
LPIRSSILY

SEQ ID NO: 1413 - protein, 9 aa, Homo sapiens
STYGIITSR

SEQ ID NO: 1414 - protein, 9 aa, Homo sapiens
VVADVSNNK

SEQ ID NO: 1415 - protein, 10 aa, Homo sapiens
VVADVSSNNK

SEQ ID NO: 1416 - protein, 8 aa, Homo sapiens
LELATYEL

SEQ ID NO: 1417 - protein, 9 aa, Homo sapiens
SIFTGFLLY

SEQ ID NO: 1418 - protein, 8 aa, Homo sapiens
DESLIYSF

SEQ ID NO: 1419 - protein, 9 aa, Homo sapiens
SEDLKSVKY

SEQ ID NO: 1420 - protein, 11 aa, Homo sapiens
TLDPATANAYL

SEQ ID NO: 1421 - protein, 11 aa, Homo sapiens
VLQSEDEQGSY

SEQ ID NO: 1422 - protein, 9 aa, Homo sapiens
RLYSGTARY

SEQ ID NO: 1423 - protein, 11 aa, Homo sapiens
VTSGEYSLFQK

SEQ ID NO: 1424 - protein, 9 aa, Homo sapiens
GVHGGILNK

SEQ ID NO: 1425 - protein, 10 aa, Homo sapiens
GGLLGPSHSY

SEQ ID NO: 1426 - protein, 9 aa, Homo sapiens
TVIDVFYQY

SEQ ID NO: 1427 - protein, 10 aa, Homo sapiens
EYFPKSVSEY

SEQ ID NO: 1428 - protein, 9 aa, Homo sapiens
ASSQSTPVK

SEQ ID NO: 1429 - protein, 10 aa, Homo sapiens
GTMSTISPSK

SEQ ID NO: 1430 - protein, 9 aa, Homo sapiens
TPLKWYQSI

SEQ ID NO: 1431 - protein, 11 aa, Homo sapiens
SLPSPGELYAV

SEQ ID NO: 1432 - protein, 10 aa, Homo sapiens
GTEQLTITGK

SEQ ID NO: 1433 - protein, 9 aa, Homo sapiens
LYMQIINFF

SEQ ID NO: 1434 - protein, 9 aa, Homo sapiens
SGISQVFQR

SEQ ID NO: 1435 - protein, 9 aa, Homo sapiens
DSLPRLTSV

SEQ ID NO: 1436 - protein, 9 aa, Homo sapiens
HAKDIIQSF

SEQ ID NO: 1437 - protein, 10 aa, Homo sapiens
EEAANNGYSW

SEQ ID NO: 1438 - protein, 9 aa, Homo sapiens
AFSDRTNAL

SEQ ID NO: 1439 - protein, 9 aa, Homo sapiens
DAAGFFTVF

SEQ ID NO: 1440 - protein, 8 aa, Homo sapiens
DAAGFFTV

SEQ ID NO: 1441 - protein, 9 aa, Homo sapiens
FPIFGISSY

SEQ ID NO: 1442 - protein, 11 aa, Homo sapiens
TLWEIQNKLKL

SEQ ID NO: 1443 - protein, 10 aa, Homo sapiens
ASLTTDGSLK

SEQ ID NO: 1444 - protein, 9 aa, Homo sapiens
LAIAGMNTI

SEQ ID NO: 1445 - protein, 9 aa, Homo sapiens
LYLFGVTKY

SEQ ID NO: 1446 - protein, 9 aa, Homo sapiens
HPIGGDVAL

SEQ ID NO: 1447 - protein, 9 aa, Homo sapiens
FAYIAGHSI

SEQ ID NO: 1448 - protein, 9 aa, Homo sapiens
MVDGAVHWL

SEQ ID NO: 1449 - protein, 9 aa, Homo sapiens
IVFGDRFDY

SEQ ID NO: 1450 - protein, 11 aa, Homo sapiens
EEIFLAKIEKF

SEQ ID NO: 1451 - protein, 9 aa, Homo sapiens
STEEIFLAK

SEQ ID NO: 1452 - protein, 9 aa, Homo sapiens
IYSNTLQSI

SEQ ID NO: 1453 - protein, 9 aa, Homo sapiens
DEKGTIYDY

SEQ ID NO: 1454 - protein, 9 aa, Homo sapiens
NEYVSFKQY

SEQ ID NO: 1455 - protein, 9 aa, Homo sapiens
GSGLHQVSK

SEQ ID NO: 1456 - protein, 9 aa, Homo sapiens
DTTHPISYY

SEQ ID NO: 1457 - protein, 9 aa, Homo sapiens
YAHLTNSSI

SEQ ID NO: 1458 - protein, 9 aa, Homo sapiens
AQNARIFSK

SEQ ID NO: 1459 - protein, 9 aa, Homo sapiens
KLVTDLPNV

SEQ ID NO: 1460 - protein, 9 aa, Homo sapiens
HVVSGVFFY

SEQ ID NO: 1461 - protein, 9 aa, Homo sapiens
YVPIFVVGV

SEQ ID NO: 1462 - protein, 8 aa, Homo sapiens
SAPEIPTI

SEQ ID NO: 1463 - protein, 8 aa, Homo sapiens
DEVQIEVV

SEQ ID NO: 1464 - protein, 9 aa, Homo sapiens
QPIYQQPAY

SEQ ID NO: 1465 - protein, 9 aa, Homo sapiens
IFTSATYLY

SEQ ID NO: 1466 - protein, 9 aa, Homo sapiens
RSHSLVATY

SEQ ID NO: 1467 - protein, 10 aa, Homo sapiens
YFEFPLLERY

SEQ ID NO: 1468 - protein, 11 aa, Homo sapiens
GTNIVVLGVEK

SEQ ID NO: 1469 - protein, 10 aa, Homo sapiens
AVKSVGEPKY

SEQ ID NO: 1470 - protein, 9 aa, Homo sapiens
DETESSFAM

SEQ ID NO: 1471 - protein, 9 aa, Homo sapiens
FASDVRINF

SEQ ID NO: 1472 - protein, 9 aa, Homo sapiens
KVIGIVIGK

SEQ ID NO: 1473 - protein, 9 aa, Homo sapiens
LYDETESSF

SEQ ID NO: 1474 - protein, 9 aa, Homo sapiens
SLDFKSVFL

SEQ ID NO: 1475 - protein, 9 aa, Homo sapiens
YAYISTLNI

SEQ ID NO: 1476 - protein, 11 aa, Homo sapiens
DEYGQELGIKW

SEQ ID NO: 1477 - protein, 10 aa, Homo sapiens
SEAVSVLHHW

SEQ ID NO: 1478 - protein, 11 aa, Homo sapiens
STLDLANTLQK

SEQ ID NO: 1479 - protein, 11 aa, Homo sapiens
QEAAENYRKLF

SEQ ID NO: 1480 - protein, 9 aa, Homo sapiens
EYLFDTHTL

SEQ ID NO: 1481 - protein, 9 aa, Homo sapiens
VYLSMAYYF

SEQ ID NO: 1482 - protein, 10 aa, Homo sapiens
QTLGIPLTPK

SEQ ID NO: 1483 - protein, 11 aa, Homo sapiens
LFSPITQQLRY

SEQ ID NO: 1484 - protein, 9 aa, Homo sapiens
ALAPLLMTL

SEQ ID NO: 1485 - protein, 9 aa, Homo sapiens
AAHPIGLVY

SEQ ID NO: 1486 - protein, 9 aa, Homo sapiens
AENGLLEKI

SEQ ID NO: 1487 - protein, 11 aa, Homo sapiens
EEIEYPATISY

SEQ ID NO: 1488 - protein, 9 aa, Homo sapiens
IEYPATISY

SEQ ID NO: 1489 - protein, 8 aa, Homo sapiens
MEFPAVTF

SEQ ID NO: 1490 - protein, 9 aa, Homo sapiens
ASQLHTLIK

SEQ ID NO: 1491 - protein, 11 aa, Homo sapiens
EEQLKILINTF

SEQ ID NO: 1492 - protein, 9 aa, Homo sapiens
RIQIWFQNR

SEQ ID NO: 1493 - protein, 9 aa, Homo sapiens
RVQIWFQNR

SEQ ID NO: 1494 - protein, 9 aa, Homo sapiens
GLNQLYFYY

SEQ ID NO: 1495 - protein, 10 aa, Homo sapiens
HAISSAGVMY

SEQ ID NO: 1496 - protein, 9 aa, Homo sapiens
EVAQSNSAF

SEQ ID NO: 1497 - protein, 9 aa, Homo sapiens
ATDSFHTEL

SEQ ID NO: 1498 - protein, 9 aa, Homo sapiens
IYAPPNNRF

SEQ ID NO: 1499 - protein, 8 aa, Homo sapiens
VPAQQPVI

SEQ ID NO: 1500 - protein, 8 aa, Homo sapiens
DESTILHL

SEQ ID NO: 1501 - protein, 9 aa, Homo sapiens
MEGPFFRDY

SEQ ID NO: 1502 - protein, 9 aa, Homo sapiens
DPAVFQLVY

SEQ ID NO: 1503 - protein, 10 aa, Homo sapiens
GSYSNNSTEK

SEQ ID NO: 1504 - protein, 9 aa, Homo sapiens
ATAQKLKKK

SEQ ID NO: 1505 - protein, 10 aa, Homo sapiens
GTATLLIVRY

SEQ ID NO: 1506 - protein, 10 aa, Homo sapiens
ATAGARSKVK

SEQ ID NO: 1507 - protein, 9 aa, Homo sapiens
VPLGIRNTI

SEQ ID NO: 1508 - protein, 9 aa, Homo sapiens
ILRPPVEAY

SEQ ID NO: 1509 - protein, 9 aa, Homo sapiens
VLSAVTPEL

SEQ ID NO: 1510 - protein, 9 aa, Homo sapiens
VVPPWNPQL

SEQ ID NO: 1511 - protein, 9 aa, Homo sapiens
SQDEILTNK

SEQ ID NO: 1512 - protein, 9 aa, Homo sapiens
FSDFGLLWY

SEQ ID NO: 1513 - protein, 8 aa, Homo sapiens
NAITGSAF

SEQ ID NO: 1514 - protein, 9 aa, Homo sapiens
SEYPIIFVY

SEQ ID NO: 1515 - protein, 10 aa, Homo sapiens
GSDFGHSSSY

SEQ ID NO: 1516 - protein, 9 aa, Homo sapiens
ETPSETPTY

SEQ ID NO: 1517 - protein, 11 aa, Homo sapiens
ISETPSETPTY

SEQ ID NO: 1518 - protein, 10 aa, Homo sapiens
SETPSETPTY

SEQ ID NO: 1519 - protein, 10 aa, Homo sapiens
EEVARFLTYY

SEQ ID NO: 1520 - protein, 10 aa, Homo sapiens
SEAPSLPVVF

SEQ ID NO: 1521 - protein, 9 aa, Homo sapiens
GTGQVSSTY

SEQ ID NO: 1522 - protein, 9 aa, Homo sapiens
HFLFLFLLY

SEQ ID NO: 1523 - protein, 9 aa, Homo sapiens
MEYLTQAAF

SEQ ID NO: 1524 - protein, 9 aa, Homo sapiens
WTDGSSYDY

SEQ ID NO: 1525 - protein, 9 aa, Homo sapiens
EEFLDGEHW

SEQ ID NO: 1526 - protein, 11 aa, Homo sapiens
SEFENIGAIGL

SEQ ID NO: 1527 - protein, 9 aa, Homo sapiens
GLSEVISVV

SEQ ID NO: 1528 - protein, 9 aa, Homo sapiens
IYANISGHL

SEQ ID NO: 1529 - protein, 11 aa, Homo sapiens
AVYENELVATR

SEQ ID NO: 1530 - protein, 9 aa, Homo sapiens
NEIVATIKF

SEQ ID NO: 1531 - protein, 10 aa, Homo sapiens
AQNARIFSKY

SEQ ID NO: 1532 - protein, 10 aa, Homo sapiens
EEIVNIHNAL

SEQ ID NO: 1533 - protein, 11 aa, Homo sapiens
AINLVTKGINK

SEQ ID NO: 1534 - protein, 9 aa, Homo sapiens
WVDGISHEL

SEQ ID NO: 1535 - protein, 9 aa, Homo sapiens
KLDQTTMNV

SEQ ID NO: 1536 - protein, 9 aa, Homo sapiens
YFFSGPKTY

SEQ ID NO: 1537 - protein, 9 aa, Homo sapiens
TLIETTAEA

SEQ ID NO: 1538 - protein, 9 aa, Homo sapiens
FLWRGNVVL

SEQ ID NO: 1539 - protein, 8 aa, Homo sapiens
QEVITTVY

SEQ ID NO: 1540 - protein, 9 aa, Homo sapiens
AVDIVSQSK

SEQ ID NO: 1541 - protein, 9 aa, Homo sapiens
KLPVPLESV

SEQ ID NO: 1542 - protein, 9 aa, Homo sapiens
TAFGDLEVF

SEQ ID NO: 1543 - protein, 10 aa, Homo sapiens
KTELETALYY

SEQ ID NO: 1544 - protein, 9 aa, Homo sapiens
TELETALYY

SEQ ID NO: 1545 - protein, 9 aa, Homo sapiens
ESIPESSLY

SEQ ID NO: 1546 - protein, 9 aa, Homo sapiens
ALAESVAQL

SEQ ID NO: 1547 - protein, 9 aa, Homo sapiens
LAYLVGQSI

SEQ ID NO: 1548 - protein, 9 aa, Homo sapiens
IVLPVWLNY

SEQ ID NO: 1549 - protein, 9 aa, Homo sapiens
ATMGKLASK

SEQ ID NO: 1550 - protein, 9 aa, Homo sapiens
IITDLSLYY

SEQ ID NO: 1551 - protein, 9 aa, Homo sapiens
QSQPIGYQR

SEQ ID NO: 1552 - protein, 9 aa, Homo sapiens
KNIALNGEY

SEQ ID NO: 1553 - protein, 9 aa, Homo sapiens
YPKLPMPYI

SEQ ID NO: 1554 - protein, 10 aa, Homo sapiens
VYIPGSNATL

SEQ ID NO: 1555 - protein, 11 aa, Homo sapiens
KVYAENGLLEK

SEQ ID NO: 1556 - protein, 9 aa, Homo sapiens
AEFIESGQY

SEQ ID NO: 1557 - protein, 10 aa, Homo sapiens
ASTDPNIVRK

SEQ ID NO: 1558 - protein, 10 aa, Homo sapiens
STDPNIVRKK

SEQ ID NO: 1559 - protein, 9 aa, Homo sapiens
STDPNIVRK

SEQ ID NO: 1560 - protein, 11 aa, Homo sapiens
AVSPPASNMLK

SEQ ID NO: 1561 - protein, 8 aa, Homo sapiens
DEILDFVY

SEQ ID NO: 1562 - protein, 9 aa, Homo sapiens
DPTSWSSAI

SEQ ID NO: 1563 - protein, 10 aa, Homo sapiens
LPAEGKDPAF

SEQ ID NO: 1564 - protein, 9 aa, Homo sapiens
LPVLFLVTV

SEQ ID NO: 1565 - protein, 9 aa, Homo sapiens
VSPPASNML

SEQ ID NO: 1566 - protein, 10 aa, Homo sapiens
REVTTNAQRW

SEQ ID NO: 1567 - protein, 9 aa, Homo sapiens
AADIIIGHL

SEQ ID NO: 1568 - protein, 9 aa, Homo sapiens
AATVTKELR

SEQ ID NO: 1569 - protein, 8 aa, Homo sapiens
AATVTKEL

SEQ ID NO: 1570 - protein, 9 aa, Homo sapiens
ADFSGLLEK

SEQ ID NO: 1571 - protein, 8 aa, Homo sapiens
ADIIIGHL

SEQ ID NO: 1572 - protein, 8 aa, Homo sapiens
ADLATIFF

SEQ ID NO: 1573 - protein, 8 aa, Homo sapiens
AEEGQKLI

SEQ ID NO: 1574 - protein, 11 aa, Homo sapiens
AEISLADLATI

SEQ ID NO: 1575 - protein, 9 aa, Homo sapiens
AEISLADLA

SEQ ID NO: 1576 - protein, 8 aa, Homo sapiens
AEISLADL

SEQ ID NO: 1577 - protein, 8 aa, Homo sapiens
AENAVECF

SEQ ID NO: 1578 - protein, 10 aa, Homo sapiens
AENDEKPEGL

SEQ ID NO: 1579 - protein, 9 aa, Homo sapiens
AFSDDKFIF

SEQ ID NO: 1580 - protein, 9 aa, Homo sapiens
ALQTMKQEF

SEQ ID NO: 1581 - protein, 11 aa, Homo sapiens
APQLTSSELMA

SEQ ID NO: 1582 - protein, 10 aa, Homo sapiens
APQLTSSELM

SEQ ID NO: 1583 - protein, 9 aa, Homo sapiens
APQLTSSEL

SEQ ID NO: 1584 - protein, 9 aa, Homo sapiens
APTILLWAA

SEQ ID NO: 1585 - protein, 10 aa, Homo sapiens
AQFVQEATYK

SEQ ID NO: 1586 - protein, 9 aa, Homo sapiens
AQFVQEATY

SEQ ID NO: 1587 - protein, 8 aa, Homo sapiens
AQFVQEAT

SEQ ID NO: 1588 - protein, 9 aa, Homo sapiens
AQGVALQTM

SEQ ID NO: 1589 - protein, 8 aa, Homo sapiens
AQGVALQT

SEQ ID NO: 1590 - protein, 9 aa, Homo sapiens
ASFVHEYSR

SEQ ID NO: 1591 - protein, 9 aa, Homo sapiens
ATIFFAQFV

SEQ ID NO: 1592 - protein, 11 aa, Homo sapiens
ATYKEVSKMVK

SEQ ID NO: 1593 - protein, 9 aa, Homo sapiens
ATYKEVSKM

SEQ ID NO: 1594 - protein, 8 aa, Homo sapiens
ATYKEVSK

SEQ ID NO: 1595 - protein, 9 aa, Homo sapiens
AVIADFSGL

SEQ ID NO: 1596 - protein, 9 aa, Homo sapiens
AVMKNFGTR

SEQ ID NO: 1597 - protein, 10 aa, Homo sapiens
AVSVILRVAK

SEQ ID NO: 1598 - protein, 9 aa, Homo sapiens
AVSVILRVA

SEQ ID NO: 1599 - protein, 8 aa, Homo sapiens
AVSVILRV

SEQ ID NO: 1600 - protein, 10 aa, Homo sapiens
AYEEDRETFM

SEQ ID NO: 1601 - protein, 9 aa, Homo sapiens
AYEEDRETF

SEQ ID NO: 1602 - protein, 9 aa, Homo sapiens
AYTKKAPQL

SEQ ID NO: 1603 - protein, 9 aa, Homo sapiens
CFQTKAATV

SEQ ID NO: 1604 - protein, 11 aa, Homo sapiens
CLQDGEKIMSY

SEQ ID NO: 1605 - protein, 11 aa, Homo sapiens
CQAQGVALQTM

SEQ ID NO: 1606 - protein, 8 aa, Homo sapiens
CQAQGVAL

SEQ ID NO: 1607 - protein, 9 aa, Homo sapiens
CQDKGEEEL

SEQ ID NO: 1608 - protein, 10 aa, Homo sapiens
CSQQDTLSNK

SEQ ID NO: 1609 - protein, 9 aa, Homo sapiens
DALTAIEKP

SEQ ID NO: 1610 - protein, 8 aa, Homo sapiens
DALTAIEK

SEQ ID NO: 1611 - protein, 9 aa, Homo sapiens
DEKPEGLSP

SEQ ID NO: 1612 - protein, 9 aa, Homo sapiens
DETYVPPAF

SEQ ID NO: 1613 - protein, 8 aa, Homo sapiens
DETYVPPA

SEQ ID NO: 1614 - protein, 10 aa, Homo sapiens
DFNQFSSGEK

SEQ ID NO: 1615 - protein, 9 aa, Homo sapiens
DGEKIMSYI

SEQ ID NO: 1616 - protein, 8 aa, Homo sapiens
DGEKIMSY

SEQ ID NO: 1617 - protein, 11 aa, Homo sapiens
DLATIFFAQFV

SEQ ID NO: 1618 - protein, 10 aa, Homo sapiens
DLATIFFAQF

SEQ ID NO: 1619 - protein, 9 aa, Homo sapiens
DSYQCTAEI

SEQ ID NO: 1620 - protein, 9 aa, Homo sapiens
DTLSNKITE

SEQ ID NO: 1621 - protein, 9 aa, Homo sapiens
EATYKEVSK

SEQ ID NO: 1622 - protein, 10 aa, Homo sapiens
EAVIADFSGL

SEQ ID NO: 1623 - protein, 11 aa, Homo sapiens
EAYEEDRETFM

SEQ ID NO: 1624 - protein, 10 aa, Homo sapiens
EAYEEDRETF

SEQ ID NO: 1625 - protein, 11 aa, Homo sapiens
EEDRETFMNKF

SEQ ID NO: 1626 - protein, 9 aa, Homo sapiens
EEGQKLISK

SEQ ID NO: 1627 - protein, 11 aa, Homo sapiens
EEQLEAVIADF

SEQ ID NO: 1628 - protein, 11 aa, Homo sapiens
EGAADIIIGHL

SEQ ID NO: 1629 - protein, 10 aa, Homo sapiens
EGAADIIIGH

SEQ ID NO: 1630 - protein, 9 aa, Homo sapiens
EGLSPNLNR

SEQ ID NO: 1631 - protein, 10 aa, Homo sapiens
EGQKLISKTR

SEQ ID NO: 1632 - protein, 9 aa, Homo sapiens
EIQKLVLDV

SEQ ID NO: 1633 - protein, 11 aa, Homo sapiens
ELMAITRKMAA

SEQ ID NO: 1634 - protein, 9 aa, Homo sapiens
ELMAITRKM

SEQ ID NO: 1635 - protein, 11 aa, Homo sapiens
ELRESSLLNQH

SEQ ID NO: 1636 - protein, 9 aa, Homo sapiens
EMTPVNPGV

SEQ ID NO: 1637 - protein, 9 aa, Homo sapiens
ENDEKPEGL

SEQ ID NO: 1638 - protein, 9 aa, Homo sapiens
EPVTSCEAY

SEQ ID NO: 1639 - protein, 10 aa, Homo sapiens
EQLEAVIADF

SEQ ID NO: 1640 - protein, 9 aa, Homo sapiens
ESIFLIFLL

SEQ ID NO: 1641 - protein, 8 aa, Homo sapiens
ESQALAKR

SEQ ID NO: 1642 - protein, 9 aa, Homo sapiens
ETFMNKFIY

SEQ ID NO: 1643 - protein, 8 aa, Homo sapiens
ETYVPPAF

SEQ ID NO: 1644 - protein, 10 aa, Homo sapiens
EVSKMVKDAL

SEQ ID NO: 1645 - protein, 11 aa, Homo sapiens
EYGIASILDSY

SEQ ID NO: 1646 - protein, 8 aa, Homo sapiens
EYGIASIL

SEQ ID NO: 1647 - protein, 9 aa, Homo sapiens
EYSRRHPQL

SEQ ID NO: 1648 - protein, 9 aa, Homo sapiens
EYYLQNAFL

SEQ ID NO: 1649 - protein, 8 aa, Homo sapiens
EYYLQNAF

SEQ ID NO: 1650 - protein, 11 aa, Homo sapiens
FAEEGQKLISK

SEQ ID NO: 1651 - protein, 9 aa, Homo sapiens
FAEEGQKLI

SEQ ID NO: 1652 - protein, 8 aa, Homo sapiens
FAEEGQKL

SEQ ID NO: 1653 - protein, 11 aa, Homo sapiens
FAQFVQEATYK

SEQ ID NO: 1654 - protein, 10 aa, Homo sapiens
FAQFVQEATY

SEQ ID NO: 1655 - protein, 8 aa, Homo sapiens
FAQFVQEA

SEQ ID NO: 1656 - protein, 11 aa, Homo sapiens
FFAQFVQEATY

SEQ ID NO: 1657 - protein, 9 aa, Homo sapiens
FFAQFVQEA

SEQ ID NO: 1658 - protein, 10 aa, Homo sapiens
FIFHKDLCQA

SEQ ID NO: 1659 - protein, 10 aa, Homo sapiens
FLAHKKPTPA

SEQ ID NO: 1660 - protein, 9 aa, Homo sapiens
FLASFVHEY

SEQ ID NO: 1661 - protein, 10 aa, Homo sapiens
FLGDRDFNQF

SEQ ID NO: 1662 - protein, 11 aa, Homo sapiens
FLLNFTESRTL

SEQ ID NO: 1663 - protein, 9 aa, Homo sapiens
FLLNFTESR

SEQ ID NO: 1664 - protein, 9 aa, Homo sapiens
FLVAYTKKA

SEQ ID NO: 1665 - protein, 10 aa, Homo sapiens
FLYAPTILLW

SEQ ID NO: 1666 - protein, 9 aa, Homo sapiens
FLYAPTILL

SEQ ID NO: 1667 - protein, 9 aa, Homo sapiens
FMNKFIYEI

SEQ ID NO: 1668 - protein, 9 aa, Homo sapiens
FQAITVTKL

SEQ ID NO: 1669 - protein, 8 aa, Homo sapiens
FQKLGEYY

SEQ ID NO: 1670 - protein, 9 aa, Homo sapiens
FQTENPLEC

SEQ ID NO: 1671 - protein, 10 aa, Homo sapiens
FQTKAATVTK

SEQ ID NO: 1672 - protein, 9 aa, Homo sapiens
FQTKAATVT

SEQ ID NO: 1673 - protein, 8 aa, Homo sapiens
FQTKAATV

SEQ ID NO: 1674 - protein, 9 aa, Homo sapiens
FQVPEPVTS

SEQ ID NO: 1675 - protein, 9 aa, Homo sapiens
FSDDKFIFH

SEQ ID NO: 1676 - protein, 9 aa, Homo sapiens
FSSGEKNIF

SEQ ID NO: 1677 - protein, 10 aa, Homo sapiens
FSSLVVDETY

SEQ ID NO: 1678 - protein, 9 aa, Homo sapiens
FTEIQKLVL

SEQ ID NO: 1679 - protein, 9 aa, Homo sapiens
FTESRTLHR

SEQ ID NO: 1680 - protein, 9 aa, Homo sapiens
FTKVNFTEI

SEQ ID NO: 1681 - protein, 10 aa, Homo sapiens
FVQEATYKEV

SEQ ID NO: 1682 - protein, 8 aa, Homo sapiens
FVQEATYK

SEQ ID NO: 1683 - protein, 10 aa, Homo sapiens
GAADIIIGHL

SEQ ID NO: 1684 - protein, 9 aa, Homo sapiens
GAADIIIGH

SEQ ID NO: 1685 - protein, 8 aa, Homo sapiens
GDRDFNQF

SEQ ID NO: 1686 - protein, 9 aa, Homo sapiens
GEEELQKYI

SEQ ID NO: 1687 - protein, 8 aa, Homo sapiens
GEEELQKY

SEQ ID NO: 1688 - protein, 9 aa, Homo sapiens
GEGAADIII

SEQ ID NO: 1689 - protein, 8 aa, Homo sapiens
GEKIMSYI

SEQ ID NO: 1690 - protein, 10 aa, Homo sapiens
GEKNIFLASF

SEQ ID NO: 1691 - protein, 10 aa, Homo sapiens
GEYYLQNAFL

SEQ ID NO: 1692 - protein, 9 aa, Homo sapiens
GEYYLQNAF

SEQ ID NO: 1693 - protein, 8 aa, Homo sapiens
GEYYLQNA

SEQ ID NO: 1694 - protein, 9 aa, Homo sapiens
GIASILDSY

SEQ ID NO: 1695 - protein, 11 aa, Homo sapiens
GLFQKLGEYYL

SEQ ID NO: 1696 - protein, 10 aa, Homo sapiens
GLFQKLGEYY

SEQ ID NO: 1697 - protein, 9 aa, Homo sapiens
GLFQKLGEY

SEQ ID NO: 1698 - protein, 10 aa, Homo sapiens
GLSPNLNRFL

SEQ ID NO: 1699 - protein, 9 aa, Homo sapiens
GLSPNLNRF

SEQ ID NO: 1700 - protein, 9 aa, Homo sapiens
GQKLISKTR

SEQ ID NO: 1701 - protein, 10 aa, Homo sapiens
GTRTFQAITV

SEQ ID NO: 1702 - protein, 9 aa, Homo sapiens
HEKEILEKY

SEQ ID NO: 1703 - protein, 10 aa, Homo sapiens
HEMTPVNPGV

SEQ ID NO: 1704 - protein, 9 aa, Homo sapiens
HKKPTPASI

SEQ ID NO: 1705 - protein, 9 aa, Homo sapiens
HPFLYAPTI

SEQ ID NO: 1706 - protein, 10 aa, Homo sapiens
HPQLAVSVIL

SEQ ID NO: 1707 - protein, 9 aa, Homo sapiens
HPQLAVSVI

SEQ ID NO: 1708 - protein, 8 aa, Homo sapiens
HPQLAVSV

SEQ ID NO: 1709 - protein, 10 aa, Homo sapiens
IADFSGLLEK

SEQ ID NO: 1710 - protein, 8 aa, Homo sapiens
IADFSGLL

SEQ ID NO: 1711 - protein, 8 aa, Homo sapiens
IASILDSY

SEQ ID NO: 1712 - protein, 8 aa, Homo sapiens
ICSQQDTL

SEQ ID NO: 1713 - protein, 9 aa, Homo sapiens
IEKPTGDEQ

SEQ ID NO: 1714 - protein, 10 aa, Homo sapiens
IFLASFVHEY

SEQ ID NO: 1715 - protein, 9 aa, Homo sapiens
IFLIFLLNF

SEQ ID NO: 1716 - protein, 9 aa, Homo sapiens
ILDSYQCTA

SEQ ID NO: 1717 - protein, 9 aa, Homo sapiens
IPLFQVPEP

SEQ ID NO: 1718 - protein, 10 aa, Homo sapiens
IQESQALAKR

SEQ ID NO: 1719 - protein, 9 aa, Homo sapiens
IQESQALAK

SEQ ID NO: 1720 - protein, 8 aa, Homo sapiens
IQKLVLDV

SEQ ID NO: 1721 - protein, 8 aa, Homo sapiens
ISKTRAAL

SEQ ID NO: 1722 - protein, 10 aa, Homo sapiens
ISLADLATIF

SEQ ID NO: 1723 - protein, 9 aa, Homo sapiens
ISLADLATI

SEQ ID NO: 1724 - protein, 10 aa, Homo sapiens
ITVTKLSQKF

SEQ ID NO: 1725 - protein, 9 aa, Homo sapiens
ITVTKLSQK

SEQ ID NO: 1726 - protein, 9 aa, Homo sapiens
KAATVTKEL

SEQ ID NO: 1727 - protein, 9 aa, Homo sapiens
KAENAVECF

SEQ ID NO: 1728 - protein, 10 aa, Homo sapiens
KAPQLTSSEL

SEQ ID NO: 1729 - protein, 9 aa, Homo sapiens
KDALTAIEK

SEQ ID NO: 1730 - protein, 9 aa, Homo sapiens
KDLCQAQGV

SEQ ID NO: 1731 - protein, 9 aa, Homo sapiens
KELRESSLL

SEQ ID NO: 1732 - protein, 8 aa, Homo sapiens
KELRESSL

SEQ ID NO: 1733 - protein, 9 aa, Homo sapiens
KFIYEIARR

SEQ ID NO: 1734 - protein, 9 aa, Homo sapiens
KGEEELQKY

SEQ ID NO: 1735 - protein, 9 aa, Homo sapiens
KGYQELLEK

SEQ ID NO: 1736 - protein, 11 aa, Homo sapiens
KKAPQLTSSEL

SEQ ID NO: 1737 - protein, 9 aa, Homo sapiens
KLSQKFTKV

SEQ ID NO: 1738 - protein, 9 aa, Homo sapiens
KLVLDVAHV

SEQ ID NO: 1739 - protein, 9 aa, Homo sapiens
KMAATAATC

SEQ ID NO: 1740 - protein, 10 aa, Homo sapiens
KMVKDALTAI

SEQ ID NO: 1741 - protein, 9 aa, Homo sapiens
KPEGLSPNL

SEQ ID NO: 1742 - protein, 11 aa, Homo sapiens
KPQITEEQLEA

SEQ ID NO: 1743 - protein, 9 aa, Homo sapiens
KPQITEEQL

SEQ ID NO: 1744 - protein, 10 aa, Homo sapiens
KPTPASIPLF

SEQ ID NO: 1745 - protein, 9 aa, Homo sapiens
KPTPASIPL

SEQ ID NO: 1746 - protein, 8 aa, Homo sapiens
KTRAALGV

SEQ ID NO: 1747 - protein, 10 aa, Homo sapiens
KVNFTEIQKL

SEQ ID NO: 1748 - protein, 9 aa, Homo sapiens
KVNFTEIQK

SEQ ID NO: 1749 - protein, 10 aa, Homo sapiens
KWVESIFLIF

SEQ ID NO: 1750 - protein, 9 aa, Homo sapiens
KWVESIFLI

SEQ ID NO: 1751 - protein, 11 aa, Homo sapiens
KYIQESQALAK

SEQ ID NO: 1752 - protein, 9 aa, Homo sapiens
KYIQESQAL

SEQ ID NO: 1753 - protein, 9 aa, Homo sapiens
LADLATIFF

SEQ ID NO: 1754 - protein, 8 aa, Homo sapiens
LADLATIF

SEQ ID NO: 1755 - protein, 9 aa, Homo sapiens
LAHKKPTPA

SEQ ID NO: 1756 - protein, 8 aa, Homo sapiens
LASFVHEY

SEQ ID NO: 1757 - protein, 9 aa, Homo sapiens
LATIFFAQF

SEQ ID NO: 1758 - protein, 10 aa, Homo sapiens
LAVSVILRVA

SEQ ID NO: 1759 - protein, 9 aa, Homo sapiens
LAVSVILRV

SEQ ID NO: 1760 - protein, 9 aa, Homo sapiens
LCQAQGVAL

SEQ ID NO: 1761 - protein, 8 aa, Homo sapiens
LEAVIADF

SEQ ID NO: 1762 - protein, 9 aa, Homo sapiens
LENQLPAFL

SEQ ID NO: 1763 - protein, 8 aa, Homo sapiens
LENQLPAF

SEQ ID NO: 1764 - protein, 9 aa, Homo sapiens
LFQKLGEYY

SEQ ID NO: 1765 - protein, 8 aa, Homo sapiens
LFQKLGEY

SEQ ID NO: 1766 - protein, 9 aa, Homo sapiens
LGDRDFNQF

SEQ ID NO: 1767 - protein, 9 aa, Homo sapiens
LLNQHACAV

SEQ ID NO: 1768 - protein, 9 aa, Homo sapiens
LNFTESRTL

SEQ ID NO: 1769 - protein, 8 aa, Homo sapiens
LPAFLEEL

SEQ ID NO: 1770 - protein, 10 aa, Homo sapiens
LQDGEKIMSY

SEQ ID NO: 1771 - protein, 8 aa, Homo sapiens
LQDGEKIM

SEQ ID NO: 1772 - protein, 9 aa, Homo sapiens
LQNAFLVAY

SEQ ID NO: 1773 - protein, 8 aa, Homo sapiens
LQTMKQEF

SEQ ID NO: 1774 - protein, 10 aa, Homo sapiens
LSQKFTKVNF

SEQ ID NO: 1775 - protein, 11 aa, Homo sapiens
LTSSELMAITR

SEQ ID NO: 1776 - protein, 8 aa, Homo sapiens
LVKQKPQI

SEQ ID NO: 1777 - protein, 9 aa, Homo sapiens
LYAPTILLW

SEQ ID NO: 1778 - protein, 8 aa, Homo sapiens
LYAPTILL

SEQ ID NO: 1779 - protein, 9 aa, Homo sapiens
MAATAATCC

SEQ ID NO: 1780 - protein, 8 aa, Homo sapiens
MAATAATC

SEQ ID NO: 1781 - protein, 9 aa, Homo sapiens
MAITRKMAA

SEQ ID NO: 1782 - protein, 11 aa, Homo sapiens
MVKDALTAIEK

SEQ ID NO: 1783 - protein, 9 aa, Homo sapiens
MVKDALTAI

SEQ ID NO: 1784 - protein, 9 aa, Homo sapiens
NAFLVAYTK

SEQ ID NO: 1785 - protein, 9 aa, Homo sapiens
NAVECFQTK

SEQ ID NO: 1786 - protein, 9 aa, Homo sapiens
NEYGIASIL

SEQ ID NO: 1787 - protein, 8 aa, Homo sapiens
NEYGIASI

SEQ ID NO: 1788 - protein, 8 aa, Homo sapiens
NFTEIQKL

SEQ ID NO: 1789 - protein, 8 aa, Homo sapiens
NFTESRTL

SEQ ID NO: 1790 - protein, 11 aa, Homo sapiens
NIFLASFVHEY

SEQ ID NO: 1791 - protein, 11 aa, Homo sapiens
NQFSSGEKNIF

SEQ ID NO: 1792 - protein, 10 aa, Homo sapiens
NQFSSGEKNI

SEQ ID NO: 1793 - protein, 8 aa, Homo sapiens
PFLYAPTI

SEQ ID NO: 1794 - protein, 9 aa, Homo sapiens
PTPASIPLF

SEQ ID NO: 1795 - protein, 11 aa, Homo sapiens
QAITVTKLSQK

SEQ ID NO: 1796 - protein, 8 aa, Homo sapiens
QAITVTKL

SEQ ID NO: 1797 - protein, 11 aa, Homo sapiens
QAQGVALQTMK

SEQ ID NO: 1798 - protein, 10 aa, Homo sapiens
QAQGVALQTM

SEQ ID NO: 1799 - protein, 9 aa, Homo sapiens
QDGEKIMSY

SEQ ID NO: 1800 - protein, 8 aa, Homo sapiens
QDTLSNKI

SEQ ID NO: 1801 - protein, 8 aa, Homo sapiens
QEATYKEV

SEQ ID NO: 1802 - protein, 8 aa, Homo sapiens
QEFLINLV

SEQ ID NO: 1803 - protein, 9 aa, Homo sapiens
QESQALAKR

SEQ ID NO: 1804 - protein, 8 aa, Homo sapiens
QFVQEATY

SEQ ID NO: 1805 - protein, 9 aa, Homo sapiens
QGVALQTMK

SEQ ID NO: 1806 - protein, 8 aa, Homo sapiens
QGVALQTM

SEQ ID NO: 1807 - protein, 10 aa, Homo sapiens
QHACAVMKNF

SEQ ID NO: 1808 - protein, 8 aa, Homo sapiens
QKFTKVNF

SEQ ID NO: 1809 - protein, 10 aa, Homo sapiens
QKYIQESQAL

SEQ ID NO: 1810 - protein, 10 aa, Homo sapiens
QLAVSVILRV

SEQ ID NO: 1811 - protein, 9 aa, Homo sapiens
QLAVSVILR

SEQ ID NO: 1812 - protein, 9 aa, Homo sapiens
QLPAFLEEL

SEQ ID NO: 1813 - protein, 10 aa, Homo sapiens
QLSEDKLLAC

SEQ ID NO: 1814 - protein, 9 aa, Homo sapiens
QLSEDKLLA

SEQ ID NO: 1815 - protein, 10 aa, Homo sapiens
QNAFLVAYTK

SEQ ID NO: 1816 - protein, 9 aa, Homo sapiens
QQDTLSNKI

SEQ ID NO: 1817 - protein, 9 aa, Homo sapiens
QTKAATVTK

SEQ ID NO: 1818 - protein, 11 aa, Homo sapiens
QTMKQEFLINL

SEQ ID NO: 1819 - protein, 9 aa, Homo sapiens
QVPEPVTSC

SEQ ID NO: 1820 - protein, 8 aa, Homo sapiens
RETFMNKF

SEQ ID NO: 1821 - protein, 11 aa, Homo sapiens
RFLGDRDFNQF

SEQ ID NO: 1822 - protein, 11 aa, Homo sapiens
RTFQAITVTKL

SEQ ID NO: 1823 - protein, 10 aa, Homo sapiens
RTFQAITVTK

SEQ ID NO: 1824 - protein, 9 aa, Homo sapiens
SEEGRHNCF

SEQ ID NO: 1825 - protein, 10 aa, Homo sapiens
SELMAITRKM

SEQ ID NO: 1826 - protein, 8 aa, Homo sapiens
SELMAITR

SEQ ID NO: 1827 - protein, 8 aa, Homo sapiens
SIFLIFLL

SEQ ID NO: 1828 - protein, 8 aa, Homo sapiens
SKMVKDAL

SEQ ID NO: 1829 - protein, 11 aa, Homo sapiens
SLADLATIFFA

SEQ ID NO: 1830 - protein, 10 aa, Homo sapiens
SLADLATIFF

SEQ ID NO: 1831 - protein, 9 aa, Homo sapiens
SLADLATIF

SEQ ID NO: 1832 - protein, 8 aa, Homo sapiens
SLADLATI

SEQ ID NO: 1833 - protein, 10 aa, Homo sapiens
SLLNQHACAV

SEQ ID NO: 1834 - protein, 9 aa, Homo sapiens
SLVVDETYV

SEQ ID NO: 1835 - protein, 8 aa, Homo sapiens
SLVVDETY

SEQ ID NO: 1836 - protein, 8 aa, Homo sapiens
SPNLNRFL

SEQ ID NO: 1837 - protein, 9 aa, Homo sapiens
SQKFTKVNF

SEQ ID NO: 1838 - protein, 10 aa, Homo sapiens
SQQDTLSNKI

SEQ ID NO: 1839 - protein, 9 aa, Homo sapiens
SQQDTLSNK

SEQ ID NO: 1840 - protein, 10 aa, Homo sapiens
SSELMAITRK

SEQ ID NO: 1841 - protein, 9 aa, Homo sapiens
SSELMAITR

SEQ ID NO: 1842 - protein, 8 aa, Homo sapiens
SSGEKNIF

SEQ ID NO: 1843 - protein, 9 aa, Homo sapiens
SSLVVDETY

SEQ ID NO: 1844 - protein, 9 aa, Homo sapiens
SYANRRPCF

SEQ ID NO: 1845 - protein, 10 aa, Homo sapiens
SYICSQQDTL

SEQ ID NO: 1846 - protein, 10 aa, Homo sapiens
SYQCTAEISL

SEQ ID NO: 1847 - protein, 8 aa, Homo sapiens
SYQCTAEI

SEQ ID NO: 1848 - protein, 9 aa, Homo sapiens
TAEISLADL

SEQ ID NO: 1849 - protein, 9 aa, Homo sapiens
TECCKLTTL

SEQ ID NO: 1850 - protein, 9 aa, Homo sapiens
TEEQLEAVI

SEQ ID NO: 1851 - protein, 10 aa, Homo sapiens
TEIQKLVLDV

SEQ ID NO: 1852 - protein, 8 aa, Homo sapiens
TEIQKLVL

SEQ ID NO: 1853 - protein, 10 aa, Homo sapiens
TENPLECQDK

SEQ ID NO: 1854 - protein, 10 aa, Homo sapiens
TFQAITVTKL

SEQ ID NO: 1855 - protein, 9 aa, Homo sapiens
TFQAITVTK

SEQ ID NO: 1856 - protein, 10 aa, Homo sapiens
TGDEQSSGCL

SEQ ID NO: 1857 - protein, 9 aa, Homo sapiens
TILLWAARY

SEQ ID NO: 1858 - protein, 9 aa, Homo sapiens
TLSNKITEC

SEQ ID NO: 1859 - protein, 10 aa, Homo sapiens
TMKQEFLINL

SEQ ID NO: 1860 - protein, 10 aa, Homo sapiens
TPASIPLFQV

SEQ ID NO: 1861 - protein, 10 aa, Homo sapiens
TPVNPGVGQC

SEQ ID NO: 1862 - protein, 9 aa, Homo sapiens
TPVNPGVGQ

SEQ ID NO: 1863 - protein, 11 aa, Homo sapiens
TRTFQAITVTK

SEQ ID NO: 1864 - protein, 9 aa, Homo sapiens
TRTFQAITV

SEQ ID NO: 1865 - protein, 11 aa, Homo sapiens
TSSELMAITRK

SEQ ID NO: 1866 - protein, 10 aa, Homo sapiens
TSSELMAITR

SEQ ID NO: 1867 - protein, 9 aa, Homo sapiens
TVTKLSQKF

SEQ ID NO: 1868 - protein, 8 aa, Homo sapiens
TVTKLSQK

SEQ ID NO: 1869 - protein, 10 aa, Homo sapiens
TYKEVSKMVK

SEQ ID NO: 1870 - protein, 9 aa, Homo sapiens
TYKEVSKMV

SEQ ID NO: 1871 - protein, 8 aa, Homo sapiens
TYKEVSKM

SEQ ID NO: 1872 - protein, 9 aa, Homo sapiens
VAKGYQELL

SEQ ID NO: 1873 - protein, 8 aa, Homo sapiens
VAKGYQEL

SEQ ID NO: 1874 - protein, 11 aa, Homo sapiens
VECFQTKAATV

SEQ ID NO: 1875 - protein, 8 aa, Homo sapiens
VESIFLIF

SEQ ID NO: 1876 - protein, 9 aa, Homo sapiens
VGQCCTSSY

SEQ ID NO: 1877 - protein, 11 aa, Homo sapiens
VIADFSGLLEK

SEQ ID NO: 1878 - protein, 9 aa, Homo sapiens
VIADFSGLL

SEQ ID NO: 1879 - protein, 8 aa, Homo sapiens
VIADFSGL

SEQ ID NO: 1880 - protein, 9 aa, Homo sapiens
VILRVAKGY

SEQ ID NO: 1881 - protein, 10 aa, Homo sapiens
VLDVAHVHEH

SEQ ID NO: 1882 - protein, 8 aa, Homo sapiens
VLDVAHVH

SEQ ID NO: 1883 - protein, 10 aa, Homo sapiens
VMKNFGTRTF

SEQ ID NO: 1884 - protein, 8 aa, Homo sapiens
VMKNFGTR

SEQ ID NO: 1885 - protein, 9 aa, Homo sapiens
VNFTEIQKL

SEQ ID NO: 1886 - protein, 11 aa, Homo sapiens
VPEPVTSCEAY

SEQ ID NO: 1887 - protein, 10 aa, Homo sapiens
VPEPVTSCEA

SEQ ID NO: 1888 - protein, 8 aa, Homo sapiens
VPEPVTSC

SEQ ID NO: 1889 - protein, 11 aa, Homo sapiens
VQEATYKEVSK

SEQ ID NO: 1890 - protein, 9 aa, Homo sapiens
VQEATYKEV

SEQ ID NO: 1891 - protein, 9 aa, Homo sapiens
VSKMVKDAL

SEQ ID NO: 1892 - protein, 10 aa, Homo sapiens
VTKELRESSL

SEQ ID NO: 1893 - protein, 8 aa, Homo sapiens
VTKLSQKF

SEQ ID NO: 1894 - protein, 11 aa, Homo sapiens
VVDETYVPPAF

SEQ ID NO: 1895 - protein, 9 aa, Homo sapiens
VVDETYVPP

SEQ ID NO: 1896 - protein, 8 aa, Homo sapiens
YAPTILLW

SEQ ID NO: 1897 - protein, 9 aa, Homo sapiens
YEEDRETFM

SEQ ID NO: 1898 - protein, 8 aa, Homo sapiens
YEEDRETF

SEQ ID NO: 1899 - protein, 10 aa, Homo sapiens
YGIASILDSY

SEQ ID NO: 1900 - protein, 9 aa, Homo sapiens
YICSQQDTL

SEQ ID NO: 1901 - protein, 11 aa, Homo sapiens
YIQESQALAKR

SEQ ID NO: 1902 - protein, 10 aa, Homo sapiens
YIQESQALAK

SEQ ID NO: 1903 - protein, 9 aa, Homo sapiens
YIQESQALA

SEQ ID NO: 1904 - protein, 8 aa, Homo sapiens
YIQESQAL

SEQ ID NO: 1905 - protein, 10 aa, Homo sapiens
YLQNAFLVAY

SEQ ID NO: 1906 - protein, 9 aa, Homo sapiens
YLQNAFLVA

SEQ ID NO: 1907 - protein, 8 aa, Homo sapiens
YLQNAFLV

SEQ ID NO: 1908 - protein, 9 aa, Homo sapiens
YQCTAEISL

SEQ ID NO: 1909 - protein, 8 aa, Homo sapiens
YTKKAPQL

SEQ ID NO: 1910 - protein, 11 aa, Homo sapiens
YYLQNAFLVAY

SEQ ID NO: 1911 - protein, 9 aa, Homo sapiens
YYLQNAFLV

SEQ ID NO: 1912 - protein, 8 aa, Homo sapiens
YYLQNAFL

SEQ ID NO: 1913 - protein, 9 aa, Homo sapiens
AAGIGILTV

SEQ ID NO: 1914 - protein, 10 aa, Homo sapiens
AEEAAGIGIL

SEQ ID NO: 1915 - protein, 9 aa, Homo sapiens
AEEAAGIGI

SEQ ID NO: 1916 - protein, 10 aa, Homo sapiens
AEQSPPPYSP

SEQ ID NO: 1917 - protein, 8 aa, Homo sapiens
AEQSPPPY

SEQ ID NO: 1918 - protein, 9 aa, Homo sapiens
AGIGILTVI

SEQ ID NO: 1919 - protein, 10 aa, Homo sapiens
ALMDKSLHVG

SEQ ID NO: 1920 - protein, 9 aa, Homo sapiens
ALMDKSLHV

SEQ ID NO: 1921 - protein, 10 aa, Homo sapiens
APPAYEKLSA

SEQ ID NO: 1922 - protein, 9 aa, Homo sapiens
CPQEGFDHR

SEQ ID NO: 1923 - protein, 10 aa, Homo sapiens
DAHFIYGYPK

SEQ ID NO: 1924 - protein, 8 aa, Homo sapiens
DAHFIYGY

SEQ ID NO: 1925 - protein, 9 aa, Homo sapiens
DHRDSKVSL

SEQ ID NO: 1926 - protein, 9 aa, Homo sapiens
DSKVSLQEK

SEQ ID NO: 1927 - protein, 11 aa, Homo sapiens
EAAGIGILTVI

SEQ ID NO: 1928 - protein, 10 aa, Homo sapiens
EAAGIGILTV

SEQ ID NO: 1929 - protein, 9 aa, Homo sapiens
EAAGIGILT

SEQ ID NO: 1930 - protein, 9 aa, Homo sapiens
EDAHFIYGY

SEQ ID NO: 1931 - protein, 11 aa, Homo sapiens
EEAAGIGILTV

SEQ ID NO: 1932 - protein, 9 aa, Homo sapiens
EEAAGIGIL

SEQ ID NO: 1933 - protein, 8 aa, Homo sapiens
EEAAGIGI

SEQ ID NO: 1934 - protein, 11 aa, Homo sapiens
EPVVPNAPPAY

SEQ ID NO: 1935 - protein, 10 aa, Homo sapiens
EPVVPNAPPA

SEQ ID NO: 1936 - protein, 9 aa, Homo sapiens
EQSPPPYSP

SEQ ID NO: 1937 - protein, 9 aa, Homo sapiens
GILTVILGV

SEQ ID NO: 1938 - protein, 9 aa, Homo sapiens
GTQCALTRR

SEQ ID NO: 1939 - protein, 9 aa, Homo sapiens
HSYTTAEEA

SEQ ID NO: 1940 - protein, 10 aa, Homo sapiens
HVGTQCALTR

SEQ ID NO: 1941 - protein, 8 aa, Homo sapiens
HVGTQCAL

SEQ ID NO: 1942 - protein, 8 aa, Homo sapiens
ILTVILGV

SEQ ID NO: 1943 - protein, 11 aa, Homo sapiens
KLSAEQSPPPY

SEQ ID NO: 1944 - protein, 9 aa, Homo sapiens
KSLHVGTQC

SEQ ID NO: 1945 - protein, 9 aa, Homo sapiens
LHVGTQCAL

SEQ ID NO: 1946 - protein, 10 aa, Homo sapiens
LSAEQSPPPY

SEQ ID NO: 1947 - protein, 10 aa, Homo sapiens
MPREDAHFIY

SEQ ID NO: 1948 - protein, 9 aa, Homo sapiens
MPREDAHFI

SEQ ID NO: 1949 - protein, 9 aa, Homo sapiens
NAPPAYEKL

SEQ ID NO: 1950 - protein, 10 aa, Homo sapiens
PVVPNAPPAY

SEQ ID NO: 1951 - protein, 9 aa, Homo sapiens
QEKNCEPVV

SEQ ID NO: 1952 - protein, 10 aa, Homo sapiens
REDAHFIYGY

SEQ ID NO: 1953 - protein, 9 aa, Homo sapiens
SAEQSPPPY

SEQ ID NO: 1954 - protein, 9 aa, Homo sapiens
SYTTAEEAA

SEQ ID NO: 1955 - protein, 8 aa, Homo sapiens
SYTTAEEA

SEQ ID NO: 1956 - protein, 11 aa, Homo sapiens
TAEEAAGIGIL

SEQ ID NO: 1957 - protein, 10 aa, Homo sapiens
TAEEAAGIGI

SEQ ID NO: 1958 - protein, 8 aa, Homo sapiens
TAEEAAGI

SEQ ID NO: 1959 - protein, 11 aa, Homo sapiens
TTAEEAAGIGI

SEQ ID NO: 1960 - protein, 9 aa, Homo sapiens
VILGVLLLI

SEQ ID NO: 1961 - protein, 11 aa, Homo sapiens
VPNAPPAYEKL

SEQ ID NO: 1962 - protein, 10 aa, Homo sapiens
VPNAPPAYEK

SEQ ID NO: 1963 - protein, 8 aa, Homo sapiens
VPNAPPAY

SEQ ID NO: 1964 - protein, 11 aa, Homo sapiens
VVPNAPPAYEK

SEQ ID NO: 1965 - protein, 9 aa, Homo sapiens
VVPNAPPAY

SEQ ID NO: 1966 - protein, 9 aa, Homo sapiens
YRALMDKSL

SEQ ID NO: 1967 - protein, 11 aa, Homo sapiens
ACSSPSVVASL

SEQ ID NO: 1968 - protein, 10 aa, Homo sapiens
AEILESVIRN

SEQ ID NO: 1969 - protein, 8 aa, Homo sapiens
AEILESVI

SEQ ID NO: 1970 - protein, 9 aa, Homo sapiens
AEIRKMSLL

SEQ ID NO: 1971 - protein, 8 aa, Homo sapiens
AEIRKMSL

SEQ ID NO: 1972 - protein, 11 aa, Homo sapiens
AKVNGSDPRSF

SEQ ID NO: 1973 - protein, 8 aa, Homo sapiens
ALNMMGLY

SEQ ID NO: 1974 - protein, 9 aa, Homo sapiens
AMASASSSA

SEQ ID NO: 1975 - protein, 9 aa, Homo sapiens
APLAVEEDA

SEQ ID NO: 1976 - protein, 9 aa, Homo sapiens
AQAPLAVEE

SEQ ID NO: 1977 - protein, 10 aa, Homo sapiens
AQIACSSPSV

SEQ ID NO: 1978 - protein, 11 aa, Homo sapiens
ASASSSATGSF

SEQ ID NO: 1979 - protein, 11 aa, Homo sapiens
ASSSATGSFSY

SEQ ID NO: 1980 - protein, 9 aa, Homo sapiens
ASSSATGSF

SEQ ID NO: 1981 - protein, 11 aa, Homo sapiens
ASSSTSTSSSF

SEQ ID NO: 1982 - protein, 9 aa, Homo sapiens
ATTDDTTAM

SEQ ID NO: 1983 - protein, 11 aa, Homo sapiens
DDETPNPPQSA

SEQ ID NO: 1984 - protein, 10 aa, Homo sapiens
DEKVTDLVQF

SEQ ID NO: 1985 - protein, 8 aa, Homo sapiens
DEKVTDLV

SEQ ID NO: 1986 - protein, 10 aa, Homo sapiens
DETPNPPQSA

SEQ ID NO: 1987 - protein, 9 aa, Homo sapiens
DETPNPPQS

SEQ ID NO: 1988 - protein, 8 aa, Homo sapiens
DETPNPPQ

SEQ ID NO: 1989 - protein, 8 aa, Homo sapiens
DGMEHLIY

SEQ ID NO: 1990 - protein, 10 aa, Homo sapiens
DGMLSDVQSM

SEQ ID NO: 1991 - protein, 9 aa, Homo sapiens
DPTGHSFVL

SEQ ID NO: 1992 - protein, 8 aa, Homo sapiens
DPTGHSFV

SEQ ID NO: 1993 - protein, 10 aa, Homo sapiens
DVKEVDPTGH

SEQ ID NO: 1994 - protein, 9 aa, Homo sapiens
EALNMMGLY

SEQ ID NO: 1995 - protein, 8 aa, Homo sapiens
EALNMMGL

SEQ ID NO: 1996 - protein, 9 aa, Homo sapiens
EASECMLLV

SEQ ID NO: 1997 - protein, 8 aa, Homo sapiens
EDHFPLLF

SEQ ID NO: 1998 - protein, 10 aa, Homo sapiens
EESPSTLQVL

SEQ ID NO: 1999 - protein, 9 aa, Homo sapiens
EESPSTLQV

SEQ ID NO: 2000 - protein, 8 aa, Homo sapiens
EEVIWEAL

SEQ ID NO: 2001 - protein, 9 aa, Homo sapiens
EGAQAPLAV

SEQ ID NO: 2002 - protein, 9 aa, Homo sapiens
EHLIYGEPR

SEQ ID NO: 2003 - protein, 9 aa, Homo sapiens
EIDEKVTDL

SEQ ID NO: 2004 - protein, 10 aa, Homo sapiens
EILESVIRNY

SEQ ID NO: 2005 - protein, 8 aa, Homo sapiens
EILESVIR

SEQ ID NO: 2006 - protein, 9 aa, Homo sapiens
EKVTDLVQF

SEQ ID NO: 2007 - protein, 9 aa, Homo sapiens
EPITKAEIL

SEQ ID NO: 2008 - protein, 8 aa, Homo sapiens
EPITKAEI

SEQ ID NO: 2009 - protein, 11 aa, Homo sapiens
ESLPRSEIDEK

SEQ ID NO: 2010 - protein, 9 aa, Homo sapiens
ESPSTLQVL

SEQ ID NO: 2011 - protein, 11 aa, Homo sapiens
ETPNPPQSAQI

SEQ ID NO: 2012 - protein, 9 aa, Homo sapiens
ETPNPPQSA

SEQ ID NO: 2013 - protein, 11 aa, Homo sapiens
EVDPTGHSFVL

SEQ ID NO: 2014 - protein, 10 aa, Homo sapiens
EVDPTGHSFV

SEQ ID NO: 2015 - protein, 9 aa, Homo sapiens
EVDPTGHSF

SEQ ID NO: 2016 - protein, 10 aa, Homo sapiens
EVIWEALNMM

SEQ ID NO: 2017 - protein, 9 aa, Homo sapiens
EVIWEALNM

SEQ ID NO: 2018 - protein, 8 aa, Homo sapiens
FGIDVKEV

SEQ ID NO: 2019 - protein, 11 aa, Homo sapiens
FLWGPRAHAEI

SEQ ID NO: 2020 - protein, 11 aa, Homo sapiens
FPLLFSEASEC

SEQ ID NO: 2021 - protein, 9 aa, Homo sapiens
FPLLFSEAS

SEQ ID NO: 2022 - protein, 8 aa, Homo sapiens
FPLLFSEA

SEQ ID NO: 2023 - protein, 9 aa, Homo sapiens
FPLWYEEAL

SEQ ID NO: 2024 - protein, 8 aa, Homo sapiens
FPLWYEEA

SEQ ID NO: 2025 - protein, 10 aa, Homo sapiens
FPSSFPSSSS

SEQ ID NO: 2026 - protein, 9 aa, Homo sapiens
FPSSFPSSS

SEQ ID NO: 2027 - protein, 8 aa, Homo sapiens
FPSSFPSS

SEQ ID NO: 2028 - protein, 9 aa, Homo sapiens
FPSSSSSSS

SEQ ID NO: 2029 - protein, 9 aa, Homo sapiens
FSEASECML

SEQ ID NO: 2030 - protein, 11 aa, Homo sapiens
FVLVTSLGLTY

SEQ ID NO: 2031 - protein, 10 aa, Homo sapiens
GHSFVLVTSL

SEQ ID NO: 2032 - protein, 11 aa, Homo sapiens
GLYDGMEHLIY

SEQ ID NO: 2033 - protein, 10 aa, Homo sapiens
GLYDGMEHLI

SEQ ID NO: 2034 - protein, 9 aa, Homo sapiens
GLYDGMEHL

SEQ ID NO: 2035 - protein, 11 aa, Homo sapiens
GMLSDVQSMPK

SEQ ID NO: 2036 - protein, 9 aa, Homo sapiens
GMLSDVQSM

SEQ ID NO: 2037 - protein, 8 aa, Homo sapiens
GPRAHAEI

SEQ ID NO: 2038 - protein, 11 aa, Homo sapiens
GSDPARYEFLW

SEQ ID NO: 2039 - protein, 9 aa, Homo sapiens
GSDPARYEF

SEQ ID NO: 2040 - protein, 11 aa, Homo sapiens
GSDPRSFPLWY

SEQ ID NO: 2041 - protein, 10 aa, Homo sapiens
GSDPRSFPLW

SEQ ID NO: 2042 - protein, 9 aa, Homo sapiens
GSDPRSFPL

SEQ ID NO: 2043 - protein, 9 aa, Homo sapiens
HAEIRKMSL

SEQ ID NO: 2044 - protein, 9 aa, Homo sapiens
HSFVLVTSL

SEQ ID NO: 2045 - protein, 9 aa, Homo sapiens
IACSSPSVV

SEQ ID NO: 2046 - protein, 8 aa, Homo sapiens
IACSSPSV

SEQ ID NO: 2047 - protein, 10 aa, Homo sapiens
IATTDDTTAM

SEQ ID NO: 2048 - protein, 9 aa, Homo sapiens
IATTDDTTA

SEQ ID NO: 2049 - protein, 8 aa, Homo sapiens
IDEKVTDL

SEQ ID NO: 2050 - protein, 9 aa, Homo sapiens
ILESVIRNY

SEQ ID NO: 2051 - protein, 9 aa, Homo sapiens
ILILSIVFI

SEQ ID NO: 2052 - protein, 10 aa, Homo sapiens
ILSIVFIEGY

SEQ ID NO: 2053 - protein, 10 aa, Homo sapiens
IPSTPEEVSA

SEQ ID NO: 2054 - protein, 9 aa, Homo sapiens
IYGEPRKLL

SEQ ID NO: 2055 - protein, 8 aa, Homo sapiens
IYGEPRKL

SEQ ID NO: 2056 - protein, 11 aa, Homo sapiens
KEESPSTLQVL

SEQ ID NO: 2057 - protein, 10 aa, Homo sapiens
KEESPSTLQV

SEQ ID NO: 2058 - protein, 8 aa, Homo sapiens
KEESPSTL

SEQ ID NO: 2059 - protein, 10 aa, Homo sapiens
KEPITKAEIL

SEQ ID NO: 2060 - protein, 9 aa, Homo sapiens
KEPITKAEI

SEQ ID NO: 2061 - protein, 11 aa, Homo sapiens
KEVDPTGHSFV

SEQ ID NO: 2062 - protein, 10 aa, Homo sapiens
KVNGSDPRSF

SEQ ID NO: 2063 - protein, 10 aa, Homo sapiens
KVTDLVQFLL

SEQ ID NO: 2064 - protein, 9 aa, Homo sapiens
KVTDLVQFL

SEQ ID NO: 2065 - protein, 8 aa, Homo sapiens
KVTDLVQF

SEQ ID NO: 2066 - protein, 10 aa, Homo sapiens
LEGAQAPLAV

SEQ ID NO: 2067 - protein, 9 aa, Homo sapiens
LEGAQAPLA

SEQ ID NO: 2068 - protein, 8 aa, Homo sapiens
LEGAQAPL

SEQ ID NO: 2069 - protein, 8 aa, Homo sapiens
LESVIRNY

SEQ ID NO: 2070 - protein, 9 aa, Homo sapiens
LFSEASECM

SEQ ID NO: 2071 - protein, 9 aa, Homo sapiens
LIPSTPEEV

SEQ ID NO: 2072 - protein, 9 aa, Homo sapiens
LIYGEPRKL

SEQ ID NO: 2073 - protein, 11 aa, Homo sapiens
LLFSEASECML

SEQ ID NO: 2074 - protein, 9 aa, Homo sapiens
LLFSEASEC

SEQ ID NO: 2075 - protein, 10 aa, Homo sapiens
LQSQSETQGL

SEQ ID NO: 2076 - protein, 10 aa, Homo sapiens
LQVLPDSESL

SEQ ID NO: 2077 - protein, 9 aa, Homo sapiens
LSDVQSMPK

SEQ ID NO: 2078 - protein, 9 aa, Homo sapiens
LSIVFIEGY

SEQ ID NO: 2079 - protein, 11 aa, Homo sapiens
LTQDWVQENYL

SEQ ID NO: 2080 - protein, 10 aa, Homo sapiens
LTQDWVQENY

SEQ ID NO: 2081 - protein, 10 aa, Homo sapiens
LTYDGMLSDV

SEQ ID NO: 2082 - protein, 10 aa, Homo sapiens
LVFGIDVKEV

SEQ ID NO: 2083 - protein, 8 aa, Homo sapiens
LVFGIDVK

SEQ ID NO: 2084 - protein, 9 aa, Homo sapiens
LVQFLLFKY

SEQ ID NO: 2085 - protein, 9 aa, Homo sapiens
LVTSLGLTY

SEQ ID NO: 2086 - protein, 10 aa, Homo sapiens
LYDGMEHLIY

SEQ ID NO: 2087 - protein, 9 aa, Homo sapiens
LYDGMEHLI

SEQ ID NO: 2088 - protein, 8 aa, Homo sapiens
LYDGMEHL

SEQ ID NO: 2089 - protein, 9 aa, Homo sapiens
MASASSSAT

SEQ ID NO: 2090 - protein, 8 aa, Homo sapiens
MASASSSA

SEQ ID NO: 2091 - protein, 9 aa, Homo sapiens
MEHLIYGEP

SEQ ID NO: 2092 - protein, 9 aa, Homo sapiens
MLLVFGIDV

SEQ ID NO: 2093 - protein, 11 aa, Homo sapiens
MLSDVQSMPKT

SEQ ID NO: 2094 - protein, 10 aa, Homo sapiens
MLSDVQSMPK

SEQ ID NO: 2095 - protein, 8 aa, Homo sapiens
MLSDVQSM

SEQ ID NO: 2096 - protein, 9 aa, Homo sapiens
MPEEDLQSQ

SEQ ID NO: 2097 - protein, 9 aa, Homo sapiens
MPKTGILIL

SEQ ID NO: 2098 - protein, 8 aa, Homo sapiens
MPKTGILI

SEQ ID NO: 2099 - protein, 10 aa, Homo sapiens
NGSDPRSFPL

SEQ ID NO: 2100 - protein, 8 aa, Homo sapiens
NGSDPRSF

SEQ ID NO: 2101 - protein, 8 aa, Homo sapiens
NPPQSAQI

SEQ ID NO: 2102 - protein, 10 aa, Homo sapiens
NYEDHFPLLF

SEQ ID NO: 2103 - protein, 9 aa, Homo sapiens
NYEDHFPLL

SEQ ID NO: 2104 - protein, 8 aa, Homo sapiens
PDSESLPR

SEQ ID NO: 2105 - protein, 10 aa, Homo sapiens
PLIPSTPEEV

SEQ ID NO: 2106 - protein, 9 aa, Homo sapiens
QDWVQENYL

SEQ ID NO: 2107 - protein, 9 aa, Homo sapiens
QIACSSPSV

SEQ ID NO: 2108 - protein, 9 aa, Homo sapiens
QKEESPSTL

SEQ ID NO: 2109 - protein, 9 aa, Homo sapiens
QMKEPITKA

SEQ ID NO: 2110 - protein, 10 aa, Homo sapiens
QSDEGSSSQK

SEQ ID NO: 2111 - protein, 9 aa, Homo sapiens
QSDEGSSSQ

SEQ ID NO: 2112 - protein, 9 aa, Homo sapiens
QSMPKTGIL

SEQ ID NO: 2113 - protein, 8 aa, Homo sapiens
QSMPKTGI

SEQ ID NO: 2114 - protein, 11 aa, Homo sapiens
QVLPDSESLPR

SEQ ID NO: 2115 - protein, 9 aa, Homo sapiens
QVLPDSESL

SEQ ID NO: 2116 - protein, 10 aa, Homo sapiens
QVPGSDPARY

SEQ ID NO: 2117 - protein, 11 aa, Homo sapiens
RIATTDDTTAM

SEQ ID NO: 2118 - protein, 11 aa, Homo sapiens
RNYEDHFPLLF

SEQ ID NO: 2119 - protein, 10 aa, Homo sapiens
SASSSATGSF

SEQ ID NO: 2120 - protein, 9 aa, Homo sapiens
SATGSFSYP

SEQ ID NO: 2121 - protein, 8 aa, Homo sapiens
SATGSFSY

SEQ ID NO: 2122 - protein, 8 aa, Homo sapiens
SDPARYEF

SEQ ID NO: 2123 - protein, 9 aa, Homo sapiens
SDPRSFPLW

SEQ ID NO: 2124 - protein, 8 aa, Homo sapiens
SDVQSMPK

SEQ ID NO: 2125 - protein, 10 aa, Homo sapiens
SEASECMLLV

SEQ ID NO: 2126 - protein, 9 aa, Homo sapiens
SEASECMLL

SEQ ID NO: 2127 - protein, 8 aa, Homo sapiens
SECMLLVF

SEQ ID NO: 2128 - protein, 11 aa, Homo sapiens
SEIDEKVTDLV

SEQ ID NO: 2129 - protein, 10 aa, Homo sapiens
SEIDEKVTDL

SEQ ID NO: 2130 - protein, 9 aa, Homo sapiens
SESLPRSEI

SEQ ID NO: 2131 - protein, 8 aa, Homo sapiens
SFVLVTSL

SEQ ID NO: 2132 - protein, 8 aa, Homo sapiens
SIVFIEGY

SEQ ID NO: 2133 - protein, 9 aa, Homo sapiens
SLLKFLAKV

SEQ ID NO: 2134 - protein, 8 aa, Homo sapiens
SLLKFLAK

SEQ ID NO: 2135 - protein, 8 aa, Homo sapiens
SPSTLQVL

SEQ ID NO: 2136 - protein, 10 aa, Homo sapiens
SPSVVASLPL

SEQ ID NO: 2137 - protein, 8 aa, Homo sapiens
SPSVVASL

SEQ ID NO: 2138 - protein, 10 aa, Homo sapiens
SQKEESPSTL

SEQ ID NO: 2139 - protein, 9 aa, Homo sapiens
SSATGSFSY

SEQ ID NO: 2140 - protein, 10 aa, Homo sapiens
SSSATGSFSY

SEQ ID NO: 2141 - protein, 8 aa, Homo sapiens
SSSATGSF

SEQ ID NO: 2142 - protein, 8 aa, Homo sapiens
SSSFPSSF

SEQ ID NO: 2143 - protein, 8 aa, Homo sapiens
SSSSSSCY

SEQ ID NO: 2144 - protein, 9 aa, Homo sapiens
SSSSSSSCY

SEQ ID NO: 2145 - protein, 10 aa, Homo sapiens
SSSSSSSSCY

SEQ ID NO: 2146 - protein, 11 aa, Homo sapiens
SSSSSSSSSCY

SEQ ID NO: 2147 - protein, 9 aa, Homo sapiens
SSTSTSSSF

SEQ ID NO: 2148 - protein, 10 aa, Homo sapiens
STSSSFPSSF

SEQ ID NO: 2149 - protein, 8 aa, Homo sapiens
STSTSSSF

SEQ ID NO: 2150 - protein, 10 aa, Homo sapiens
TAMASASSSA

SEQ ID NO: 2151 - protein, 8 aa, Homo sapiens
TDLVQFLL

SEQ ID NO: 2152 - protein, 9 aa, Homo sapiens
TKAEILESV

SEQ ID NO: 2153 - protein, 10 aa, Homo sapiens
TPEEVIWEAL

SEQ ID NO: 2154 - protein, 9 aa, Homo sapiens
TPEEVIWEA

SEQ ID NO: 2155 - protein, 11 aa, Homo sapiens
TPNPPQSAQIA

SEQ ID NO: 2156 - protein, 10 aa, Homo sapiens
TPNPPQSAQI

SEQ ID NO: 2157 - protein, 8 aa, Homo sapiens
TPNPPQSA

SEQ ID NO: 2158 - protein, 10 aa, Homo sapiens
TQDWVQENYL

SEQ ID NO: 2159 - protein, 9 aa, Homo sapiens
TQDWVQENY

SEQ ID NO: 2160 - protein, 11 aa, Homo sapiens
TQGLEGAQAPL

SEQ ID NO: 2161 - protein, 9 aa, Homo sapiens
TSSSFPSSF

SEQ ID NO: 2162 - protein, 9 aa, Homo sapiens
TTDDTTAMA

SEQ ID NO: 2163 - protein, 8 aa, Homo sapiens
TTDDTTAM

SEQ ID NO: 2164 - protein, 11 aa, Homo sapiens
TYDGMLSDVQS

SEQ ID NO: 2165 - protein, 8 aa, Homo sapiens
VDPTGHSF

SEQ ID NO: 2166 - protein, 11 aa, Homo sapiens
VEEDASSSTST

SEQ ID NO: 2167 - protein, 11 aa, Homo sapiens
VKEVDPTGHSF

SEQ ID NO: 2168 - protein, 11 aa, Homo sapiens
VLPDSESLPRS

SEQ ID NO: 2169 - protein, 8 aa, Homo sapiens
VLPDSESL

SEQ ID NO: 2170 - protein, 10 aa, Homo sapiens
VLVTSLGLTY

SEQ ID NO: 2171 - protein, 9 aa, Homo sapiens
VNGSDPRSF

SEQ ID NO: 2172 - protein, 11 aa, Homo sapiens
VPGSDPARYEF

SEQ ID NO: 2173 - protein, 9 aa, Homo sapiens
VPGSDPARY

SEQ ID NO: 2174 - protein, 8 aa, Homo sapiens
VQENYLEY

SEQ ID NO: 2175 - protein, 9 aa, Homo sapiens
VQSMPKTGI

SEQ ID NO: 2176 - protein, 10 aa, Homo sapiens
VTDLVQFLLF

SEQ ID NO: 2177 - protein, 9 aa, Homo sapiens
VTDLVQFLL

SEQ ID NO: 2178 - protein, 8 aa, Homo sapiens
VTDLVQFL

SEQ ID NO: 2179 - protein, 8 aa, Homo sapiens
VTSLGLTY

SEQ ID NO: 2180 - protein, 8 aa, Homo sapiens
YDGMEHLI

SEQ ID NO: 2181 - protein, 9 aa, Homo sapiens
YEDHFPLLF

SEQ ID NO: 2182 - protein, 8 aa, Homo sapiens
YEDHFPLL

SEQ ID NO: 2183 - protein, 9 aa, Homo sapiens
YEFLWGPRA

SEQ ID NO: 2184 - protein, 11 aa, Homo sapiens
YPLIPSTPEEV

SEQ ID NO: 2185 - protein, 10 aa, Homo sapiens
YQMKEPITKA

SEQ ID NO: 2186 - protein, 9 aa, Homo sapiens
YQMKEPITK

SEQ ID NO: 2187 - protein, 11 aa, Homo sapiens
YRQVPGSDPAR

SEQ ID NO: 2188 - protein, 9 aa, Homo sapiens
AAVSSSSPL

SEQ ID NO: 2189 - protein, 10 aa, Homo sapiens
AEMLERVIKN

SEQ ID NO: 2190 - protein, 8 aa, Homo sapiens
AEMLERVI

SEQ ID NO: 2191 - protein, 9 aa, Homo sapiens
AESLFREAL

SEQ ID NO: 2192 - protein, 8 aa, Homo sapiens
AESLFREA

SEQ ID NO: 2193 - protein, 8 aa, Homo sapiens
AETSYVKV

SEQ ID NO: 2194 - protein, 10 aa, Homo sapiens
AKELVTKAEM

SEQ ID NO: 2195 - protein, 11 aa, Homo sapiens
ALAETSYVKVL

SEQ ID NO: 2196 - protein, 10 aa, Homo sapiens
ALAETSYVKV

SEQ ID NO: 2197 - protein, 8 aa, Homo sapiens
ALAETSYV

SEQ ID NO: 2198 - protein, 9 aa, Homo sapiens
ALGLVGAQA

SEQ ID NO: 2199 - protein, 11 aa, Homo sapiens
ALPTTISFTCW

SEQ ID NO: 2200 - protein, 8 aa, Homo sapiens
ALPTTISF

SEQ ID NO: 2201 - protein, 9 aa, Homo sapiens
ALSNKVDEL

SEQ ID NO: 2202 - protein, 11 aa, Homo sapiens
APTTEEQEAAV

SEQ ID NO: 2203 - protein, 9 aa, Homo sapiens
APTTEEQEA

SEQ ID NO: 2204 - protein, 11 aa, Homo sapiens
AQAPTTEEQEA

SEQ ID NO: 2205 - protein, 9 aa, Homo sapiens
AQAPTTEEQ

SEQ ID NO: 2206 - protein, 10 aa, Homo sapiens
ASALPTTISF

SEQ ID NO: 2207 - protein, 9 aa, Homo sapiens
ASESLKMIF

SEQ ID NO: 2208 - protein, 9 aa, Homo sapiens
ASNTYTLVT

SEQ ID NO: 2209 - protein, 9 aa, Homo sapiens
AVSSSSPLV

SEQ ID NO: 2210 - protein, 8 aa, Homo sapiens
AVSSSSPL

SEQ ID NO: 2211 - protein, 11 aa, Homo sapiens
AYPSLREAALL

SEQ ID NO: 2212 - protein, 10 aa, Homo sapiens
AYPSLREAAL

SEQ ID NO: 2213 - protein, 9 aa, Homo sapiens
DAESLFREA

SEQ ID NO: 2214 - protein, 11 aa, Homo sapiens
DELAHFLLRKY

SEQ ID NO: 2215 - protein, 9 aa, Homo sapiens
DELAHFLLR

SEQ ID NO: 2216 - protein, 8 aa, Homo sapiens
DELAHFLL

SEQ ID NO: 2217 - protein, 9 aa, Homo sapiens
DGLLGNNQI

SEQ ID NO: 2218 - protein, 8 aa, Homo sapiens
DGREHTVY

SEQ ID NO: 2219 - protein, 10 aa, Homo sapiens
DPASNTYTLV

SEQ ID NO: 2220 - protein, 9 aa, Homo sapiens
DPASNTYTL

SEQ ID NO: 2221 - protein, 10 aa, Homo sapiens
DVKEVDPASN

SEQ ID NO: 2222 - protein, 10 aa, Homo sapiens
EALGLVGAQA

SEQ ID NO: 2223 - protein, 9 aa, Homo sapiens
EALGLVGAQ

SEQ ID NO: 2224 - protein, 8 aa, Homo sapiens
EALGLVGA

SEQ ID NO: 2225 - protein, 9 aa, Homo sapiens
EAQEEALGL

SEQ ID NO: 2226 - protein, 11 aa, Homo sapiens
EEALGLVGAQA

SEQ ID NO: 2227 - protein, 9 aa, Homo sapiens
EEALGLVGA

SEQ ID NO: 2228 - protein, 11 aa, Homo sapiens
EEEGPSTSPDA

SEQ ID NO: 2229 - protein, 9 aa, Homo sapiens
EEEGPSTSP

SEQ ID NO: 2230 - protein, 9 aa, Homo sapiens
EEIWEELGV

SEQ ID NO: 2231 - protein, 8 aa, Homo sapiens
EELGVMGV

SEQ ID NO: 2232 - protein, 9 aa, Homo sapiens
EEVPAAESA

SEQ ID NO: 2233 - protein, 9 aa, Homo sapiens
EHTVYGEPR

SEQ ID NO: 2234 - protein, 9 aa, Homo sapiens
EHVVRVNAR

SEQ ID NO: 2235 - protein, 11 aa, Homo sapiens
EIWEELGVMGV

SEQ ID NO: 2236 - protein, 8 aa, Homo sapiens
ELGVMGVY

SEQ ID NO: 2237 - protein, 11 aa, Homo sapiens
ELVTKAEMLER

SEQ ID NO: 2238 - protein, 9 aa, Homo sapiens
ELVTKAEML

SEQ ID NO: 2239 - protein, 8 aa, Homo sapiens
ELVTKAEM

SEQ ID NO: 2240 - protein, 10 aa, Homo sapiens
EMLERVIKNY

SEQ ID NO: 2241 - protein, 9 aa, Homo sapiens
ESAGPPQSP

SEQ ID NO: 2242 - protein, 11 aa, Homo sapiens
ESLFREALSNK

SEQ ID NO: 2243 - protein, 8 aa, Homo sapiens
ESLFREAL

SEQ ID NO: 2244 - protein, 11 aa, Homo sapiens
ETSYVKVLEHV

SEQ ID NO: 2245 - protein, 10 aa, Homo sapiens
ETSYVKVLEH

SEQ ID NO: 2246 - protein, 9 aa, Homo sapiens
ETSYVKVLE

SEQ ID NO: 2247 - protein, 11 aa, Homo sapiens
EVDPASNTYTL

SEQ ID NO: 2248 - protein, 10 aa, Homo sapiens
EVPAAESAGP

SEQ ID NO: 2249 - protein, 10 aa, Homo sapiens
EYRQVPGSNP

SEQ ID NO: 2250 - protein, 9 aa, Homo sapiens
FGKASESLK

SEQ ID NO: 2251 - protein, 8 aa, Homo sapiens
FGKASESL

SEQ ID NO: 2252 - protein, 9 aa, Homo sapiens
FLWGPRALA

SEQ ID NO: 2253 - protein, 8 aa, Homo sapiens
FLWGPRAL

SEQ ID NO: 2254 - protein, 9 aa, Homo sapiens
FPKTGLLII

SEQ ID NO: 2255 - protein, 8 aa, Homo sapiens
FPKTGLLI

SEQ ID NO: 2256 - protein, 9 aa, Homo sapiens
FPVIFGKAS

SEQ ID NO: 2257 - protein, 8 aa, Homo sapiens
FPVIFGKA

SEQ ID NO: 2258 - protein, 9 aa, Homo sapiens
FREALSNKV

SEQ ID NO: 2259 - protein, 9 aa, Homo sapiens
GASALPTTI

SEQ ID NO: 2260 - protein, 9 aa, Homo sapiens
GKASESLKM

SEQ ID NO: 2261 - protein, 11 aa, Homo sapiens
GLLGNNQIFPK

SEQ ID NO: 2262 - protein, 9 aa, Homo sapiens
GLLGNNQIF

SEQ ID NO: 2263 - protein, 10 aa, Homo sapiens
GLLIIVLGTI

SEQ ID NO: 2264 - protein, 11 aa, Homo sapiens
GPPQSPQGASA

SEQ ID NO: 2265 - protein, 11 aa, Homo sapiens
GPRALAETSYV

SEQ ID NO: 2266 - protein, 10 aa, Homo sapiens
GPRALAETSY

SEQ ID NO: 2267 - protein, 11 aa, Homo sapiens
GSNPARYEFLW

SEQ ID NO: 2268 - protein, 9 aa, Homo sapiens
GSNPARYEF

SEQ ID NO: 2269 - protein, 9 aa, Homo sapiens
GTLEEVPAA

SEQ ID NO: 2270 - protein, 9 aa, Homo sapiens
GVMGVYDGR

SEQ ID NO: 2271 - protein, 11 aa, Homo sapiens
GVYDGREHTVY

SEQ ID NO: 2272 - protein, 10 aa, Homo sapiens
GVYDGREHTV

SEQ ID NO: 2273 - protein, 8 aa, Homo sapiens
HTVYGEPR

SEQ ID NO: 2274 - protein, 9 aa, Homo sapiens
HVVRVNARV

SEQ ID NO: 2275 - protein, 8 aa, Homo sapiens
IAMEGDSA

SEQ ID NO: 2276 - protein, 11 aa, Homo sapiens
IAYPSLREAAL

SEQ ID NO: 2277 - protein, 10 aa, Homo sapiens
IAYPSLREAA

SEQ ID NO: 2278 - protein, 9 aa, Homo sapiens
IAYPSLREA

SEQ ID NO: 2279 - protein, 9 aa, Homo sapiens
IFGKASESL

SEQ ID NO: 2280 - protein, 10 aa, Homo sapiens
IFPKTGLLII

SEQ ID NO: 2281 - protein, 9 aa, Homo sapiens
IFPKTGLLI

SEQ ID NO: 2282 - protein, 9 aa, Homo sapiens
IIVLGTIAM

SEQ ID NO: 2283 - protein, 10 aa, Homo sapiens
IVLGTIAMEG

SEQ ID NO: 2284 - protein, 8 aa, Homo sapiens
IVLGTIAM

SEQ ID NO: 2285 - protein, 9 aa, Homo sapiens
KAEMLERVI

SEQ ID NO: 2286 - protein, 10 aa, Homo sapiens
KASESLKMIF

SEQ ID NO: 2287 - protein, 9 aa, Homo sapiens
KASESLKMI

SEQ ID NO: 2288 - protein, 8 aa, Homo sapiens
KASESLKM

SEQ ID NO: 2289 - protein, 10 aa, Homo sapiens
KELVTKAEML

SEQ ID NO: 2290 - protein, 9 aa, Homo sapiens
KELVTKAEM

SEQ ID NO: 2291 - protein, 11 aa, Homo sapiens
KEVDPASNTYT

SEQ ID NO: 2292 - protein, 9 aa, Homo sapiens
KEVDPASNT

SEQ ID NO: 2293 - protein, 11 aa, Homo sapiens
KMIFGIDVKEV

SEQ ID NO: 2294 - protein, 11 aa, Homo sapiens
KVDELAHFLLR

SEQ ID NO: 2295 - protein, 8 aa, Homo sapiens
KVDELAHF

SEQ ID NO: 2296 - protein, 11 aa, Homo sapiens
KVLEHVVRVNA

SEQ ID NO: 2297 - protein, 9 aa, Homo sapiens
KVLEHVVRV

SEQ ID NO: 2298 - protein, 8 aa, Homo sapiens
KVLEHVVR

SEQ ID NO: 2299 - protein, 9 aa, Homo sapiens
LAETSYVKV

SEQ ID NO: 2300 - protein, 8 aa, Homo sapiens
LAETSYVK

SEQ ID NO: 2301 - protein, 9 aa, Homo sapiens
LAHFLLRKY

SEQ ID NO: 2302 - protein, 9 aa, Homo sapiens
LEHVVRVNA

SEQ ID NO: 2303 - protein, 8 aa, Homo sapiens
LERVIKNY

SEQ ID NO: 2304 - protein, 9 aa, Homo sapiens
LGNNQIFPK

SEQ ID NO: 2305 - protein, 10 aa, Homo sapiens
LGVMGVYDGR

SEQ ID NO: 2306 - protein, 10 aa, Homo sapiens
LIIVLGTIAM

SEQ ID NO: 2307 - protein, 10 aa, Homo sapiens
LLGNNQIFPK

SEQ ID NO: 2308 - protein, 9 aa, Homo sapiens
LLIIVLGTI

SEQ ID NO: 2309 - protein, 10 aa, Homo sapiens
LPTTISFTCW

SEQ ID NO: 2310 - protein, 9 aa, Homo sapiens
LPTTISFTC

SEQ ID NO: 2311 - protein, 11 aa, Homo sapiens
LSNKVDELAHF

SEQ ID NO: 2312 - protein, 10 aa, Homo sapiens
LSYDGLLGNN

SEQ ID NO: 2313 - protein, 9 aa, Homo sapiens
LVPGTLEEV

SEQ ID NO: 2314 - protein, 9 aa, Homo sapiens
LVTCLGLSY

SEQ ID NO: 2315 - protein, 10 aa, Homo sapiens
MIFGIDVKEV

SEQ ID NO: 2316 - protein, 9 aa, Homo sapiens
MLERVIKNY

SEQ ID NO: 2317 - protein, 8 aa, Homo sapiens
NARVRIAY

SEQ ID NO: 2318 - protein, 9 aa, Homo sapiens
NKVDELAHF

SEQ ID NO: 2319 - protein, 9 aa, Homo sapiens
NQIFPKTGL

SEQ ID NO: 2320 - protein, 9 aa, Homo sapiens
NTYTLVTCL

SEQ ID NO: 2321 - protein, 9 aa, Homo sapiens
NYKRCFPVI

SEQ ID NO: 2322 - protein, 8 aa, Homo sapiens
PASNTYTL

SEQ ID NO: 2323 - protein, 8 aa, Homo sapiens
PDAESLFR

SEQ ID NO: 2324 - protein, 10 aa, Homo sapiens
PLVPGTLEEV

SEQ ID NO: 2325 - protein, 9 aa, Homo sapiens
PRALAETSY

SEQ ID NO: 2326 - protein, 9 aa, Homo sapiens
PTTISFTCW

SEQ ID NO: 2327 - protein, 8 aa, Homo sapiens
QDWVQENY

SEQ ID NO: 2328 - protein, 11 aa, Homo sapiens
QEAAVSSSSPL

SEQ ID NO: 2329 - protein, 10 aa, Homo sapiens
QEEALGLVGA

SEQ ID NO: 2330 - protein, 8 aa, Homo sapiens
QEEALGLV

SEQ ID NO: 2331 - protein, 11 aa, Homo sapiens
QIFPKTGLLII

SEQ ID NO: 2332 - protein, 9 aa, Homo sapiens
QIFPKTGLL

SEQ ID NO: 2333 - protein, 8 aa, Homo sapiens
QIFPKTGL

SEQ ID NO: 2334 - protein, 10 aa, Homo sapiens
QVPGSNPARY

SEQ ID NO: 2335 - protein, 9 aa, Homo sapiens
QVPGSNPAR

SEQ ID NO: 2336 - protein, 9 aa, Homo sapiens
RAKELVTKA

SEQ ID NO: 2337 - protein, 10 aa, Homo sapiens
RALAETSYVK

SEQ ID NO: 2338 - protein, 9 aa, Homo sapiens
RCFPVIFGK

SEQ ID NO: 2339 - protein, 11 aa, Homo sapiens
REALSNKVDEL

SEQ ID NO: 2340 - protein, 8 aa, Homo sapiens
REALSNKV

SEQ ID NO: 2341 - protein, 10 aa, Homo sapiens
RIAYPSLREA

SEQ ID NO: 2342 - protein, 10 aa, Homo sapiens
RQVPGSNPAR

SEQ ID NO: 2343 - protein, 8 aa, Homo sapiens
RVIKNYKR

SEQ ID NO: 2344 - protein, 10 aa, Homo sapiens
RVNARVRIAY

SEQ ID NO: 2345 - protein, 10 aa, Homo sapiens
RVRIAYPSLR

SEQ ID NO: 2346 - protein, 9 aa, Homo sapiens
RVRIAYPSL

SEQ ID NO: 2347 - protein, 11 aa, Homo sapiens
SAGPPQSPQGA

SEQ ID NO: 2348 - protein, 9 aa, Homo sapiens
SAGPPQSPQ

SEQ ID NO: 2349 - protein, 9 aa, Homo sapiens
SEEEIWEEL

SEQ ID NO: 2350 - protein, 8 aa, Homo sapiens
SESLKMIF

SEQ ID NO: 2351 - protein, 10 aa, Homo sapiens
SLFREALSNK

SEQ ID NO: 2352 - protein, 11 aa, Homo sapiens
SPDAESLFREA

SEQ ID NO: 2353 - protein, 8 aa, Homo sapiens
SPDAESLF

SEQ ID NO: 2354 - protein, 11 aa, Homo sapiens
SPLVPGTLEEV

SEQ ID NO: 2355 - protein, 8 aa, Homo sapiens
SPLVPGTL

SEQ ID NO: 2356 - protein, 8 aa, Homo sapiens
SPQGASAL

SEQ ID NO: 2357 - protein, 9 aa, Homo sapiens
SSPLVPGTL

SEQ ID NO: 2358 - protein, 11 aa, Homo sapiens
STSPDAESLFR

SEQ ID NO: 2359 - protein, 11 aa, Homo sapiens
SYDGLLGNNQI

SEQ ID NO: 2360 - protein, 9 aa, Homo sapiens
SYDGLLGNN

SEQ ID NO: 2361 - protein, 9 aa, Homo sapiens
SYVKVLEHV

SEQ ID NO: 2362 - protein, 10 aa, Homo sapiens
TLVTCLGLSY

SEQ ID NO: 2363 - protein, 10 aa, Homo sapiens
TSPDAESLFR

SEQ ID NO: 2364 - protein, 9 aa, Homo sapiens
TSPDAESLF

SEQ ID NO: 2365 - protein, 8 aa, Homo sapiens
TSPDAESL

SEQ ID NO: 2366 - protein, 10 aa, Homo sapiens
TSYVKVLEHV

SEQ ID NO: 2367 - protein, 9 aa, Homo sapiens
TSYVKVLEH

SEQ ID NO: 2368 - protein, 9 aa, Homo sapiens
TTEEQEAAV

SEQ ID NO: 2369 - protein, 9 aa, Homo sapiens
TTISFTCWR

SEQ ID NO: 2370 - protein, 8 aa, Homo sapiens
TTISFTCW

SEQ ID NO: 2371 - protein, 9 aa, Homo sapiens
TVYGEPRKL

SEQ ID NO: 2372 - protein, 8 aa, Homo sapiens
TYTLVTCL

SEQ ID NO: 2373 - protein, 8 aa, Homo sapiens
VDELAHFL

SEQ ID NO: 2374 - protein, 8 aa, Homo sapiens
VDPASNTY

SEQ ID NO: 2375 - protein, 11 aa, Homo sapiens
VEAQEEALGLV

SEQ ID NO: 2376 - protein, 10 aa, Homo sapiens
VEAQEEALGL

SEQ ID NO: 2377 - protein, 8 aa, Homo sapiens
VEAQEEAL

SEQ ID NO: 2378 - protein, 11 aa, Homo sapiens
VIFGKASESLK

SEQ ID NO: 2379 - protein, 10 aa, Homo sapiens
VIFGKASESL

SEQ ID NO: 2380 - protein, 11 aa, Homo sapiens
VKEVDPASNTY

SEQ ID NO: 2381 - protein, 9 aa, Homo sapiens
VNARVRIAY

SEQ ID NO: 2382 - protein, 11 aa, Homo sapiens
VPGSNPARYEF

SEQ ID NO: 2383 - protein, 9 aa, Homo sapiens
VPGSNPARY

SEQ ID NO: 2384 - protein, 8 aa, Homo sapiens
VPGTLEEV

SEQ ID NO: 2385 - protein, 9 aa, Homo sapiens
VRIAYPSLR

SEQ ID NO: 2386 - protein, 8 aa, Homo sapiens
VTCLGLSY

SEQ ID NO: 2387 - protein, 9 aa, Homo sapiens
VTKAEMLER

SEQ ID NO: 2388 - protein, 10 aa, Homo sapiens
VYDGREHTVY

SEQ ID NO: 2389 - protein, 9 aa, Homo sapiens
VYDGREHTV

SEQ ID NO: 2390 - protein, 9 aa, Homo sapiens
VYGEPRKLL

SEQ ID NO: 2391 - protein, 8 aa, Homo sapiens
VYGEPRKL

SEQ ID NO: 2392 - protein, 9 aa, Homo sapiens
WEELGVMGV

SEQ ID NO: 2393 - protein, 11 aa, Homo sapiens
YDGLLGNNQIF

SEQ ID NO: 2394 - protein, 9 aa, Homo sapiens
YDGREHTVY

SEQ ID NO: 2395 - protein, 8 aa, Homo sapiens
YDGREHTV

SEQ ID NO: 2396 - protein, 10 aa, Homo sapiens
YPSLREAALL

SEQ ID NO: 2397 - protein, 9 aa, Homo sapiens
YPSLREAAL

SEQ ID NO: 2398 - protein, 8 aa, Homo sapiens
YPSLREAA

SEQ ID NO: 2399 - protein, 9 aa, Homo sapiens
YRAKELVTK

SEQ ID NO: 2400 - protein, 11 aa, Homo sapiens
YRQVPGSNPAR

SEQ ID NO: 2401 - protein, 9 aa, Homo sapiens
YRQVPGSNP

SEQ ID NO: 2402 - protein, 10 aa, Homo sapiens
YVKVLEHVVR

SEQ ID NO: 2403 - protein, 9 aa, Homo sapiens
YVKVLEHVV

SEQ ID NO: 2404 - protein, 8 aa, Homo sapiens
YVKVLEHV

SEQ ID NO: 2405 - protein, 9 aa, Homo sapiens
AADHRQLQL

SEQ ID NO: 2406 - protein, 9 aa, Homo sapiens
ADGPGGPGI

SEQ ID NO: 2407 - protein, 8 aa, Homo sapiens
ADHRQLQL

SEQ ID NO: 2408 - protein, 10 aa, Homo sapiens
AEGRGTGGST

SEQ ID NO: 2409 - protein, 11 aa, Homo sapiens
AGAARASGPGG

SEQ ID NO: 2410 - protein, 9 aa, Homo sapiens
AGAARASGP

SEQ ID NO: 2411 - protein, 9 aa, Homo sapiens
AGATGGRGP

SEQ ID NO: 2412 - protein, 10 aa, Homo sapiens
AMPFATPMEA

SEQ ID NO: 2413 - protein, 8 aa, Homo sapiens
AMPFATPM

SEQ ID NO: 2414 - protein, 11 aa, Homo sapiens
APPLPVPGVLL

SEQ ID NO: 2415 - protein, 10 aa, Homo sapiens
APPLPVPGVL

SEQ ID NO: 2416 - protein, 9 aa, Homo sapiens
APPLPVPGV

SEQ ID NO: 2417 - protein, 11 aa, Homo sapiens
APRGPHGGAAS

SEQ ID NO: 2418 - protein, 10 aa, Homo sapiens
APRGPHGGAA

SEQ ID NO: 2419 - protein, 9 aa, Homo sapiens
APRGPHGGA

SEQ ID NO: 2420 - protein, 11 aa, Homo sapiens
AQDAPPLPVPG

SEQ ID NO: 2421 - protein, 9 aa, Homo sapiens
AQDAPPLPV

SEQ ID NO: 2422 - protein, 9 aa, Homo sapiens
AQPPSGQRR

SEQ ID NO: 2423 - protein, 11 aa, Homo sapiens
ARASGPGGGAP

SEQ ID NO: 2424 - protein, 10 aa, Homo sapiens
ARASGPGGGA

SEQ ID NO: 2425 - protein, 11 aa, Homo sapiens
ARGPESRLLEF

SEQ ID NO: 2426 - protein, 9 aa, Homo sapiens
ARGPESRLL

SEQ ID NO: 2427 - protein, 10 aa, Homo sapiens
ASGPGGGAPR

SEQ ID NO: 2428 - protein, 11 aa, Homo sapiens
ATPMEAELARR

SEQ ID NO: 2429 - protein, 10 aa, Homo sapiens
ATPMEAELAR

SEQ ID NO: 2430 - protein, 8 aa, Homo sapiens
ATPMEAEL

SEQ ID NO: 2431 - protein, 10 aa, Homo sapiens
DADGPGGPGI

SEQ ID NO: 2432 - protein, 10 aa, Homo sapiens
DAPPLPVPGV

SEQ ID NO: 2433 - protein, 8 aa, Homo sapiens
DAPPLPVP

SEQ ID NO: 2434 - protein, 8 aa, Homo sapiens
DGPGGPGI

SEQ ID NO: 2435 - protein, 9 aa, Homo sapiens
DHRQLQLSI

SEQ ID NO: 2436 - protein, 9 aa, Homo sapiens
EAELARRSL

SEQ ID NO: 2437 - protein, 9 aa, Homo sapiens
EFTVSGNIL

SEQ ID NO: 2438 - protein, 8 aa, Homo sapiens
EFYLAMPF

SEQ ID NO: 2439 - protein, 9 aa, Homo sapiens
FATPMEAEL

SEQ ID NO: 2440 - protein, 11 aa, Homo sapiens
FLAQPPSGQRR

SEQ ID NO: 2441 - protein, 10 aa, Homo sapiens
FLAQPPSGQR

SEQ ID NO: 2442 - protein, 9 aa, Homo sapiens
FLAQPPSGQ

SEQ ID NO: 2443 - protein, 9 aa, Homo sapiens
FLPVFLAQP

SEQ ID NO: 2444 - protein, 11 aa, Homo sapiens
FTVSGNILTIR

SEQ ID NO: 2445 - protein, 10 aa, Homo sapiens
FTVSGNILTI

SEQ ID NO: 2446 - protein, 8 aa, Homo sapiens
FTVSGNIL

SEQ ID NO: 2447 - protein, 9 aa, Homo sapiens
GARGPESRL

SEQ ID NO: 2448 - protein, 8 aa, Homo sapiens
GATGGRGP

SEQ ID NO: 2449 - protein, 11 aa, Homo sapiens
GEAGATGGRGP

SEQ ID NO: 2450 - protein, 9 aa, Homo sapiens
GPESRLLEF

SEQ ID NO: 2451 - protein, 10 aa, Homo sapiens
GPGGGAPRGP

SEQ ID NO: 2452 - protein, 10 aa, Homo sapiens
GPHGGAASGL

SEQ ID NO: 2453 - protein, 11 aa, Homo sapiens
GPRGAGAARAS

SEQ ID NO: 2454 - protein, 10 aa, Homo sapiens
GPRGAGAARA

SEQ ID NO: 2455 - protein, 9 aa, Homo sapiens
GPRGAGAAR

SEQ ID NO: 2456 - protein, 11 aa, Homo sapiens
GRGPRGAGAAR

SEQ ID NO: 2457 - protein, 9 aa, Homo sapiens
GVLLKEFTV

SEQ ID NO: 2458 - protein, 8 aa, Homo sapiens
HGGAASGL

SEQ ID NO: 2459 - protein, 9 aa, Homo sapiens
ILTIRLTAA

SEQ ID NO: 2460 - protein, 9 aa, Homo sapiens
IPDGPGGNA

SEQ ID NO: 2461 - protein, 10 aa, Homo sapiens
KEFTVSGNIL

SEQ ID NO: 2462 - protein, 9 aa, Homo sapiens
KEFTVSGNI

SEQ ID NO: 2463 - protein, 11 aa, Homo sapiens
LAMPFATPMEA

SEQ ID NO: 2464 - protein, 9 aa, Homo sapiens
LAMPFATPM

SEQ ID NO: 2465 - protein, 10 aa, Homo sapiens
LAQDAPPLPV

SEQ ID NO: 2466 - protein, 8 aa, Homo sapiens
LAQDAPPL

SEQ ID NO: 2467 - protein, 10 aa, Homo sapiens
LAQPPSGQRR

SEQ ID NO: 2468 - protein, 9 aa, Homo sapiens
LAQPPSGQR

SEQ ID NO: 2469 - protein, 11 aa, Homo sapiens
LPVFLAQPPSG

SEQ ID NO: 2470 - protein, 10 aa, Homo sapiens
LPVFLAQPPS

SEQ ID NO: 2471 - protein, 9 aa, Homo sapiens
LPVFLAQPP

SEQ ID NO: 2472 - protein, 11 aa, Homo sapiens
LPVPGVLLKEF

SEQ ID NO: 2473 - protein, 9 aa, Homo sapiens
LPVPGVLLK

SEQ ID NO: 2474 - protein, 8 aa, Homo sapiens
LPVPGVLL

SEQ ID NO: 2475 - protein, 9 aa, Homo sapiens
LQLSISSCL

SEQ ID NO: 2476 - protein, 9 aa, Homo sapiens
LTAADHRQL

SEQ ID NO: 2477 - protein, 10 aa, Homo sapiens
MEAELARRSL

SEQ ID NO: 2478 - protein, 11 aa, Homo sapiens
MPFATPMEAEL

SEQ ID NO: 2479 - protein, 9 aa, Homo sapiens
MPFATPMEA

SEQ ID NO: 2480 - protein, 8 aa, Homo sapiens
MPFATPME

SEQ ID NO: 2481 - protein, 10 aa, Homo sapiens
NILTIRLTAA

SEQ ID NO: 2482 - protein, 9 aa, Homo sapiens
NILTIRLTA

SEQ ID NO: 2483 - protein, 10 aa, Homo sapiens
PFATPMEAEL

SEQ ID NO: 2484 - protein, 9 aa, Homo sapiens
PGGGAPRGP

SEQ ID NO: 2485 - protein, 9 aa, Homo sapiens
PLPVPGVLL

SEQ ID NO: 2486 - protein, 9 aa, Homo sapiens
PPLPVPGVL

SEQ ID NO: 2487 - protein, 10 aa, Homo sapiens
QDAPPLPVPG

SEQ ID NO: 2488 - protein, 9 aa, Homo sapiens
QDAPPLPVP

SEQ ID NO: 2489 - protein, 8 aa, Homo sapiens
QDAPPLPV

SEQ ID NO: 2490 - protein, 11 aa, Homo sapiens
RASGPGGGAPR

SEQ ID NO: 2491 - protein, 11 aa, Homo sapiens
RGAGAARASGP

SEQ ID NO: 2492 - protein, 10 aa, Homo sapiens
RGPESRLLEF

SEQ ID NO: 2493 - protein, 11 aa, Homo sapiens
RGPHGGAASGL

SEQ ID NO: 2494 - protein, 10 aa, Homo sapiens
RGPRGAGAAR

SEQ ID NO: 2495 - protein, 9 aa, Homo sapiens
RLLEFYLAM

SEQ ID NO: 2496 - protein, 9 aa, Homo sapiens
SGNILTIRL

SEQ ID NO: 2497 - protein, 11 aa, Homo sapiens
SGPGGGAPRGP

SEQ ID NO: 2498 - protein, 9 aa, Homo sapiens
SGPGGGAPR

SEQ ID NO: 2499 - protein, 8 aa, Homo sapiens
SGPGGGAP

SEQ ID NO: 2500 - protein, 9 aa, Homo sapiens
SISSCLQQL

SEQ ID NO: 2501 - protein, 11 aa, Homo sapiens
SLAQDAPPLPV

SEQ ID NO: 2502 - protein, 9 aa, Homo sapiens
SLAQDAPPL

SEQ ID NO: 2503 - protein, 9 aa, Homo sapiens
SLLMWITQC

SEQ ID NO: 2504 - protein, 10 aa, Homo sapiens
TAADHRQLQL

SEQ ID NO: 2505 - protein, 8 aa, Homo sapiens
TAADHRQL

SEQ ID NO: 2506 - protein, 10 aa, Homo sapiens
TPMEAELARR

SEQ ID NO: 2507 - protein, 9 aa, Homo sapiens
TPMEAELAR

SEQ ID NO: 2508 - protein, 8 aa, Homo sapiens
TPMEAELA

SEQ ID NO: 2509 - protein, 11 aa, Homo sapiens
TVSGNILTIRL

SEQ ID NO: 2510 - protein, 10 aa, Homo sapiens
TVSGNILTIR

SEQ ID NO: 2511 - protein, 9 aa, Homo sapiens
TVSGNILTI

SEQ ID NO: 2512 - protein, 8 aa, Homo sapiens
VLLKEFTV

SEQ ID NO: 2513 - protein, 9 aa, Homo sapiens
VSGNILTIR

SEQ ID NO: 2514 - protein, 8 aa, Homo sapiens
VSGNILTI

SEQ ID NO: 2515 - protein, 10 aa, Homo sapiens
YLAMPFATPM

SEQ ID NO: 2516 - protein, 10 aa, Homo sapiens
AAGSSSSVKW

SEQ ID NO: 2517 - protein, 9 aa, Homo sapiens
AAGSSSSVK

SEQ ID NO: 2518 - protein, 10 aa, Homo sapiens
AAQFPNHSFK

SEQ ID NO: 2519 - protein, 9 aa, Homo sapiens
AAQFPNHSF

SEQ ID NO: 2520 - protein, 9 aa, Homo sapiens
AEPHEEQCL

SEQ ID NO: 2521 - protein, 9 aa, Homo sapiens
AGSSSSVKW

SEQ ID NO: 2522 - protein, 10 aa, Homo sapiens
AIRNQGYSTV

SEQ ID NO: 2523 - protein, 9 aa, Homo sapiens
ALLPAVPSL

SEQ ID NO: 2524 - protein, 10 aa, Homo sapiens
ALPVSGAAQW

SEQ ID NO: 2525 - protein, 9 aa, Homo sapiens
ALPVSGAAQ

SEQ ID NO: 2526 - protein, 11 aa, Homo sapiens
APPGASAYGSL

SEQ ID NO: 2527 - protein, 10 aa, Homo sapiens
APPPAPPPPP

SEQ ID NO: 2528 - protein, 9 aa, Homo sapiens
APPPAPPPP

SEQ ID NO: 2529 - protein, 10 aa, Homo sapiens
APPPPPPPPP

SEQ ID NO: 2530 - protein, 9 aa, Homo sapiens
APPPPPPPP

SEQ ID NO: 2531 - protein, 11 aa, Homo sapiens
APTLVRSASET

SEQ ID NO: 2532 - protein, 9 aa, Homo sapiens
APTLVRSAS

SEQ ID NO: 2533 - protein, 8 aa, Homo sapiens
APTLVRSA

SEQ ID NO: 2534 - protein, 11 aa, Homo sapiens
APVLDFAPPGA

SEQ ID NO: 2535 - protein, 10 aa, Homo sapiens
APVLDFAPPG

SEQ ID NO: 2536 - protein, 9 aa, Homo sapiens
APVLDFAPP

SEQ ID NO: 2537 - protein, 8 aa, Homo sapiens
APYLPSCL

SEQ ID NO: 2538 - protein, 9 aa, Homo sapiens
AQFPNHSFK

SEQ ID NO: 2539 - protein, 8 aa, Homo sapiens
AQFPNHSF

SEQ ID NO: 2540 - protein, 9 aa, Homo sapiens
AQWAPVLDF

SEQ ID NO: 2541 - protein, 9 aa, Homo sapiens
ARSDELVRH

SEQ ID NO: 2542 - protein, 10 aa, Homo sapiens
ASETSEKRPF

SEQ ID NO: 2543 - protein, 9 aa, Homo sapiens
ASSGQARMF

SEQ ID NO: 2544 - protein, 11 aa, Homo sapiens
CALPVSGAAQW

SEQ ID NO: 2545 - protein, 9 aa, Homo sapiens
CALPVSGAA

SEQ ID NO: 2546 - protein, 9 aa, Homo sapiens
DELVRHHNM

SEQ ID NO: 2547 - protein, 10 aa, Homo sapiens
DFAPPGASAY

SEQ ID NO: 2548 - protein, 9 aa, Homo sapiens
DFAPPGASA

SEQ ID NO: 2549 - protein, 8 aa, Homo sapiens
DHLKTHTR

SEQ ID NO: 2550 - protein, 9 aa, Homo sapiens
DPMGQQGSL

SEQ ID NO: 2551 - protein, 9 aa, Homo sapiens
DVRDLNALL

SEQ ID NO: 2552 - protein, 8 aa, Homo sapiens
DVRDLNAL

SEQ ID NO: 2553 - protein, 8 aa, Homo sapiens
DVRRVPGV

SEQ ID NO: 2554 - protein, 8 aa, Homo sapiens
EEQCLSAF

SEQ ID NO: 2555 - protein, 10 aa, Homo sapiens
EGQSNHSTGY

SEQ ID NO: 2556 - protein, 11 aa, Homo sapiens
EQQYSVPPPVY

SEQ ID NO: 2557 - protein, 11 aa, Homo sapiens
ESQPAIRNQGY

SEQ ID NO: 2558 - protein, 9 aa, Homo sapiens
ETSEKRPFM

SEQ ID NO: 2559 - protein, 9 aa, Homo sapiens
FAPPGASAY

SEQ ID NO: 2560 - protein, 9 aa, Homo sapiens
FGPPPPSQA

SEQ ID NO: 2561 - protein, 11 aa, Homo sapiens
FPNAPYLPSCL

SEQ ID NO: 2562 - protein, 10 aa, Homo sapiens
FPNAPYLPSC

SEQ ID NO: 2563 - protein, 9 aa, Homo sapiens
FPNAPYLPS

SEQ ID NO: 2564 - protein, 8 aa, Homo sapiens
FPNAPYLP

SEQ ID NO: 2565 - protein, 10 aa, Homo sapiens
FTGTAGACRY

SEQ ID NO: 2566 - protein, 9 aa, Homo sapiens
FTGTAGACR

SEQ ID NO: 2567 - protein, 8 aa, Homo sapiens
FTGTAGAC

SEQ ID NO: 2568 - protein, 9 aa, Homo sapiens
FTVHFSGQF

SEQ ID NO: 2569 - protein, 9 aa, Homo sapiens
GAAQWAPVL

SEQ ID NO: 2570 - protein, 9 aa, Homo sapiens
GATLKGVAA

SEQ ID NO: 2571 - protein, 8 aa, Homo sapiens
GATLKGVA

SEQ ID NO: 2572 - protein, 9 aa, Homo sapiens
GEKPYQCDF

SEQ ID NO: 2573 - protein, 9 aa, Homo sapiens
GPAPPPAPP

SEQ ID NO: 2574 - protein, 11 aa, Homo sapiens
GPFGPPPPSQA

SEQ ID NO: 2575 - protein, 10 aa, Homo sapiens
GPFGPPPPSQ

SEQ ID NO: 2576 - protein, 9 aa, Homo sapiens
GPFGPPPPS

SEQ ID NO: 2577 - protein, 8 aa, Homo sapiens
GPFGPPPP

SEQ ID NO: 2578 - protein, 11 aa, Homo sapiens
GQARMFPNAPY

SEQ ID NO: 2579 - protein, 11 aa, Homo sapiens
GQFTGTAGACR

SEQ ID NO: 2580 - protein, 10 aa, Homo sapiens
GQFTGTAGAC

SEQ ID NO: 2581 - protein, 9 aa, Homo sapiens
GQFTGTAGA

SEQ ID NO: 2582 - protein, 11 aa, Homo sapiens
GQQGSLGEQQY

SEQ ID NO: 2583 - protein, 9 aa, Homo sapiens
GQSNHSTGY

SEQ ID NO: 2584 - protein, 10 aa, Homo sapiens
GSLGGPAPPP

SEQ ID NO: 2585 - protein, 11 aa, Homo sapiens
GSQALLLRTPY

SEQ ID NO: 2586 - protein, 8 aa, Homo sapiens
GSSSSVKW

SEQ ID NO: 2587 - protein, 8 aa, Homo sapiens
GTAGACRY

SEQ ID NO: 2588 - protein, 11 aa, Homo sapiens
GVAAGSSSSVK

SEQ ID NO: 2589 - protein, 10 aa, Homo sapiens
GVAAGSSSSV

SEQ ID NO: 2590 - protein, 10 aa, Homo sapiens
GVAPTLVRSA

SEQ ID NO: 2591 - protein, 9 aa, Homo sapiens
GVFRGIQDV

SEQ ID NO: 2592 - protein, 10 aa, Homo sapiens
HAAQFPNHSF

SEQ ID NO: 2593 - protein, 11 aa, Homo sapiens
HEDPMGQQGSL

SEQ ID NO: 2594 - protein, 9 aa, Homo sapiens
HEDPMGQQG

SEQ ID NO: 2595 - protein, 9 aa, Homo sapiens
HEEQCLSAF

SEQ ID NO: 2596 - protein, 11 aa, Homo sapiens
HHAAQFPNHSF

SEQ ID NO: 2597 - protein, 8 aa, Homo sapiens
HQRNMTKL

SEQ ID NO: 2598 - protein, 10 aa, Homo sapiens
HSFIKQEPSW

SEQ ID NO: 2599 - protein, 10 aa, Homo sapiens
HTPSHHAAQF

SEQ ID NO: 2600 - protein, 9 aa, Homo sapiens
HTTPILCGA

SEQ ID NO: 2601 - protein, 11 aa, Homo sapiens
IRNQGYSTVTF

SEQ ID NO: 2602 - protein, 11 aa, Homo sapiens
LDFAPPGASAY

SEQ ID NO: 2603 - protein, 10 aa, Homo sapiens
LGATLKGVAA

SEQ ID NO: 2604 - protein, 9 aa, Homo sapiens
LGGGGGCAL

SEQ ID NO: 2605 - protein, 10 aa, Homo sapiens
LLPAVPSLGG

SEQ ID NO: 2606 - protein, 8 aa, Homo sapiens
LLPAVPSL

SEQ ID NO: 2607 - protein, 9 aa, Homo sapiens
LPAVPSLGG

SEQ ID NO: 2608 - protein, 9 aa, Homo sapiens
LPVSGAAQW

SEQ ID NO: 2609 - protein, 9 aa, Homo sapiens
LSHLQMHSR

SEQ ID NO: 2610 - protein, 11 aa, Homo sapiens
LVRSASETSEK

SEQ ID NO: 2611 - protein, 8 aa, Homo sapiens
LYQMTSQL

SEQ ID NO: 2612 - protein, 8 aa, Homo sapiens
MGSDVRDL

SEQ ID NO: 2613 - protein, 9 aa, Homo sapiens
MHQRNMTKL

SEQ ID NO: 2614 - protein, 8 aa, Homo sapiens
MTKLQLAL

SEQ ID NO: 2615 - protein, 10 aa, Homo sapiens
MTSQLECMTW

SEQ ID NO: 2616 - protein, 9 aa, Homo sapiens
NAPYLPSCL

SEQ ID NO: 2617 - protein, 8 aa, Homo sapiens
NAPYLPSC

SEQ ID NO: 2618 - protein, 9 aa, Homo sapiens
NLGATLKGV

SEQ ID NO: 2619 - protein, 9 aa, Homo sapiens
NLYQMTSQL

SEQ ID NO: 2620 - protein, 9 aa, Homo sapiens
NMTKLQLAL

SEQ ID NO: 2621 - protein, 9 aa, Homo sapiens
NQGYSTVTF

SEQ ID NO: 2622 - protein, 10 aa, Homo sapiens
NQMNLGATLK

SEQ ID NO: 2623 - protein, 9 aa, Homo sapiens
NQMNLGATL

SEQ ID NO: 2624 - protein, 9 aa, Homo sapiens
PPPPPPPPP

SEQ ID NO: 2625 - protein, 9 aa, Homo sapiens
QALLLRTPY

SEQ ID NO: 2626 - protein, 10 aa, Homo sapiens
QASSGQARMF

SEQ ID NO: 2627 - protein, 9 aa, Homo sapiens
QASSGQARM

SEQ ID NO: 2628 - protein, 9 aa, Homo sapiens
QDVRRVPGV

SEQ ID NO: 2629 - protein, 11 aa, Homo sapiens
QFTGTAGACRY

SEQ ID NO: 2630 - protein, 8 aa, Homo sapiens
QGYSTVTF

SEQ ID NO: 2631 - protein, 9 aa, Homo sapiens
QMNLGATLK

SEQ ID NO: 2632 - protein, 8 aa, Homo sapiens
QMNLGATL

SEQ ID NO: 2633 - protein, 9 aa, Homo sapiens
QPAIRNQGY

SEQ ID NO: 2634 - protein, 10 aa, Homo sapiens
QQGSLGEQQY

SEQ ID NO: 2635 - protein, 10 aa, Homo sapiens
QQYSVPPPVY

SEQ ID NO: 2636 - protein, 9 aa, Homo sapiens
QQYSVPPPV

SEQ ID NO: 2637 - protein, 9 aa, Homo sapiens
QRNMTKLQL

SEQ ID NO: 2638 - protein, 8 aa, Homo sapiens
QSNHSTGY

SEQ ID NO: 2639 - protein, 9 aa, Homo sapiens
QYSVPPPVY

SEQ ID NO: 2640 - protein, 9 aa, Homo sapiens
RIHTHGVFR

SEQ ID NO: 2641 - protein, 9 aa, Homo sapiens
RMFPNAPYL

SEQ ID NO: 2642 - protein, 8 aa, Homo sapiens
RMFPNAPY

SEQ ID NO: 2643 - protein, 8 aa, Homo sapiens
RNMTKLQL

SEQ ID NO: 2644 - protein, 10 aa, Homo sapiens
RRVPGVAPTL

SEQ ID NO: 2645 - protein, 10 aa, Homo sapiens
RTPYSSDNLY

SEQ ID NO: 2646 - protein, 9 aa, Homo sapiens
RTPYSSDNL

SEQ ID NO: 2647 - protein, 11 aa, Homo sapiens
RVPGVAPTLVR

SEQ ID NO: 2648 - protein, 10 aa, Homo sapiens
RVPGVAPTLV

SEQ ID NO: 2649 - protein, 9 aa, Homo sapiens
RVPGVAPTL

SEQ ID NO: 2650 - protein, 10 aa, Homo sapiens
RYFKLSHLQM

SEQ ID NO: 2651 - protein, 11 aa, Homo sapiens
SASETSEKRPF

SEQ ID NO: 2652 - protein, 9 aa, Homo sapiens
SASETSEKR

SEQ ID NO: 2653 - protein, 10 aa, Homo sapiens
SDELVRHHNM

SEQ ID NO: 2654 - protein, 9 aa, Homo sapiens
SDNHTTPIL

SEQ ID NO: 2655 - protein, 8 aa, Homo sapiens
SDNHTTPI

SEQ ID NO: 2656 - protein, 9 aa, Homo sapiens
SDVRDLNAL

SEQ ID NO: 2657 - protein, 9 aa, Homo sapiens
SEKPFSCRW

SEQ ID NO: 2658 - protein, 9 aa, Homo sapiens
SETSEKRPF

SEQ ID NO: 2659 - protein, 9 aa, Homo sapiens
SFIKQEPSW

SEQ ID NO: 2660 - protein, 11 aa, Homo sapiens
SGQFTGTAGAC

SEQ ID NO: 2661 - protein, 9 aa, Homo sapiens
SLGEQQYSV

SEQ ID NO: 2662 - protein, 9 aa, Homo sapiens
SLGGPAPPP

SEQ ID NO: 2663 - protein, 10 aa, Homo sapiens
SQALLLRTPY

SEQ ID NO: 2664 - protein, 10 aa, Homo sapiens
SQPAIRNQGY

SEQ ID NO: 2665 - protein, 8 aa, Homo sapiens
SSDNLYQM

SEQ ID NO: 2666 - protein, 8 aa, Homo sapiens
SSGQARMF

SEQ ID NO: 2667 - protein, 11 aa, Homo sapiens
STVTFDGTPSY

SEQ ID NO: 2668 - protein, 9 aa, Homo sapiens
SVPPPVYGC

SEQ ID NO: 2669 - protein, 11 aa, Homo sapiens
TEGQSNHSTGY

SEQ ID NO: 2670 - protein, 9 aa, Homo sapiens
TFDGTPSYG

SEQ ID NO: 2671 - protein, 8 aa, Homo sapiens
TFDGTPSY

SEQ ID NO: 2672 - protein, 9 aa, Homo sapiens
TGKTSEKPF

SEQ ID NO: 2673 - protein, 9 aa, Homo sapiens
TGSQALLLR

SEQ ID NO: 2674 - protein, 9 aa, Homo sapiens
TGTAGACRY

SEQ ID NO: 2675 - protein, 9 aa, Homo sapiens
TPILCGAQY

SEQ ID NO: 2676 - protein, 9 aa, Homo sapiens
TPSHHAAQF

SEQ ID NO: 2677 - protein, 11 aa, Homo sapiens
TPYSSDNLYQM

SEQ ID NO: 2678 - protein, 9 aa, Homo sapiens
TPYSSDNLY

SEQ ID NO: 2679 - protein, 8 aa, Homo sapiens
TPYSSDNL

SEQ ID NO: 2680 - protein, 9 aa, Homo sapiens
TSQLECMTW

SEQ ID NO: 2681 - protein, 10 aa, Homo sapiens
TTPILCGAQY

SEQ ID NO: 2682 - protein, 10 aa, Homo sapiens
TVTFDGTPSY

SEQ ID NO: 2683 - protein, 11 aa, Homo sapiens
VAAGSSSSVKW

SEQ ID NO: 2684 - protein, 10 aa, Homo sapiens
VAAGSSSSVK

SEQ ID NO: 2685 - protein, 9 aa, Homo sapiens
VAAGSSSSV

SEQ ID NO: 2686 - protein, 9 aa, Homo sapiens
VAPTLVRSA

SEQ ID NO: 2687 - protein, 9 aa, Homo sapiens
VLDFAPPGA

SEQ ID NO: 2688 - protein, 9 aa, Homo sapiens
VPGVAPTLV

SEQ ID NO: 2689 - protein, 8 aa, Homo sapiens
VPGVAPTL

SEQ ID NO: 2690 - protein, 8 aa, Homo sapiens
VPPPVYGC

SEQ ID NO: 2691 - protein, 10 aa, Homo sapiens
VTFDGTPSYG

SEQ ID NO: 2692 - protein, 9 aa, Homo sapiens
VTFDGTPSY

SEQ ID NO: 2693 - protein, 11 aa, Homo sapiens
YESDNHTTPIL

SEQ ID NO: 2694 - protein, 10 aa, Homo sapiens
YESDNHTTPI

SEQ ID NO: 2695 - protein, 9 aa, Homo sapiens
YESDNHTTP

SEQ ID NO: 2696 - protein, 10 aa, Homo sapiens
YGPFGPPPPS

SEQ ID NO: 2697 - protein, 9 aa, Homo sapiens
YGPFGPPPP

SEQ ID NO: 2698 - protein, 10 aa, Homo sapiens
YQMTSQLECM

SEQ ID NO: 2699 - protein, 9 aa, Homo sapiens
YQMTSQLEC

SEQ ID NO: 2700 - protein, 9 aa, Homo sapiens
YSSDNLYQM

SEQ ID NO: 2701 - protein, 8 aa, Homo sapiens
YSVPPPVY

SEQ ID NO: 2702 - protein, 10 aa, Homo sapiens
ALALVRPSSS

SEQ ID NO: 2703 - protein, 9 aa, Homo sapiens
ALALVRPSS

SEQ ID NO: 2704 - protein, 8 aa, Homo sapiens
ALIVFWKY

SEQ ID NO: 2705 - protein, 10 aa, Homo sapiens
ALVRPSSSGL

SEQ ID NO: 2706 - protein, 10 aa, Homo sapiens
AVYDLSRDIL

SEQ ID NO: 2707 - protein, 9 aa, Homo sapiens
AVYDLSRDI

SEQ ID NO: 2708 - protein, 9 aa, Homo sapiens
CALIVFWKY

SEQ ID NO: 2709 - protein, 10 aa, Homo sapiens
DLSRDILNNF

SEQ ID NO: 2710 - protein, 11 aa, Homo sapiens
DNNLAVYDLSR

SEQ ID NO: 2711 - protein, 9 aa, Homo sapiens
EHTLLSKGF

SEQ ID NO: 2712 - protein, 11 aa, Homo sapiens
ELEHTLLSKGF

SEQ ID NO: 2713 - protein, 9 aa, Homo sapiens
ELEHTLLSK

SEQ ID NO: 2714 - protein, 9 aa, Homo sapiens
EMSSNSTAL

SEQ ID NO: 2715 - protein, 9 aa, Homo sapiens
FPHSIARQK

SEQ ID NO: 2716 - protein, 8 aa, Homo sapiens
FQRNTGEM

SEQ ID NO: 2717 - protein, 10 aa, Homo sapiens
FYLLLASSIL

SEQ ID NO: 2718 - protein, 9 aa, Homo sapiens
FYLLLASSI

SEQ ID NO: 2719 - protein, 9 aa, Homo sapiens
GASPHRKST

SEQ ID NO: 2720 - protein, 11 aa, Homo sapiens
GEMSSNSTALA

SEQ ID NO: 2721 - protein, 10 aa, Homo sapiens
GEMSSNSTAL

SEQ ID NO: 2722 - protein, 9 aa, Homo sapiens
GEMSSNSTA

SEQ ID NO: 2723 - protein, 11 aa, Homo sapiens
GLINSNTDNNL

SEQ ID NO: 2724 - protein, 9 aa, Homo sapiens
HTLLSKGFR

SEQ ID NO: 2725 - protein, 8 aa, Homo sapiens
HTLLSKGF

SEQ ID NO: 2726 - protein, 11 aa, Homo sapiens
ILNNFPHSIAR

SEQ ID NO: 2727 - protein, 10 aa, Homo sapiens
ILNNFPHSIA

SEQ ID NO: 2728 - protein, 9 aa, Homo sapiens
ILNNFPHSI

SEQ ID NO: 2729 - protein, 9 aa, Homo sapiens
INSNTDNNL

SEQ ID NO: 2730 - protein, 10 aa, Homo sapiens
KLVELEHTLL

SEQ ID NO: 2731 - protein, 9 aa, Homo sapiens
KLVELEHTL

SEQ ID NO: 2732 - protein, 9 aa, Homo sapiens
LASSILCAL

SEQ ID NO: 2733 - protein, 8 aa, Homo sapiens
LASSILCA

SEQ ID NO: 2734 - protein, 10 aa, Homo sapiens
LEHTLLSKGF

SEQ ID NO: 2735 - protein, 10 aa, Homo sapiens
LINSNTDNNL

SEQ ID NO: 2736 - protein, 10 aa, Homo sapiens
LLASSILCAL

SEQ ID NO: 2737 - protein, 9 aa, Homo sapiens
LLASSILCA

SEQ ID NO: 2738 - protein, 11 aa, Homo sapiens
LLLASSILCAL

SEQ ID NO: 2739 - protein, 9 aa, Homo sapiens
LLLASSILC

SEQ ID NO: 2740 - protein, 9 aa, Homo sapiens
LSRDILNNF

SEQ ID NO: 2741 - protein, 9 aa, Homo sapiens
LVELEHTLL

SEQ ID NO: 2742 - protein, 8 aa, Homo sapiens
LVELEHTL

SEQ ID NO: 2743 - protein, 10 aa, Homo sapiens
LVNLSMVENK

SEQ ID NO: 2744 - protein, 10 aa, Homo sapiens
LVRPSSSGLI

SEQ ID NO: 2745 - protein, 9 aa, Homo sapiens
LVRPSSSGL

SEQ ID NO: 2746 - protein, 8 aa, Homo sapiens
MSSNSTAL

SEQ ID NO: 2747 - protein, 9 aa, Homo sapiens
MVENKLVEL

SEQ ID NO: 2748 - protein, 9 aa, Homo sapiens
NLSMVENKL

SEQ ID NO: 2749 - protein, 11 aa, Homo sapiens
NSNTDNNLAVY

SEQ ID NO: 2750 - protein, 9 aa, Homo sapiens
NSTALALVR

SEQ ID NO: 2751 - protein, 11 aa, Homo sapiens
NTDNNLAVYDL

SEQ ID NO: 2752 - protein, 8 aa, Homo sapiens
NTDNNLAV

SEQ ID NO: 2753 - protein, 9 aa, Homo sapiens
RFQRNTGEM

SEQ ID NO: 2754 - protein, 9 aa, Homo sapiens
RILVNLSMV

SEQ ID NO: 2755 - protein, 8 aa, Homo sapiens
RPSSSGLI

SEQ ID NO: 2756 - protein, 9 aa, Homo sapiens
RQKRILVNL

SEQ ID NO: 2757 - protein, 10 aa, Homo sapiens
SMVENKLVEL

SEQ ID NO: 2758 - protein, 10 aa, Homo sapiens
SNSTALALVR

SEQ ID NO: 2759 - protein, 10 aa, Homo sapiens
SNTDNNLAVY

SEQ ID NO: 2760 - protein, 9 aa, Homo sapiens
SNTDNNLAV

SEQ ID NO: 2761 - protein, 11 aa, Homo sapiens
SSNSTALALVR

SEQ ID NO: 2762 - protein, 9 aa, Homo sapiens
SSNSTALAL

SEQ ID NO: 2763 - protein, 9 aa, Homo sapiens
SSSGLINSN

SEQ ID NO: 2764 - protein, 11 aa, Homo sapiens
STALALVRPSS

SEQ ID NO: 2765 - protein, 10 aa, Homo sapiens
STALALVRPS

SEQ ID NO: 2766 - protein, 9 aa, Homo sapiens
TALALVRPS

SEQ ID NO: 2767 - protein, 8 aa, Homo sapiens
TDNNLAVY

SEQ ID NO: 2768 - protein, 11 aa, Homo sapiens
TGEMSSNSTAL

SEQ ID NO: 2769 - protein, 10 aa, Homo sapiens
TLLSKGFRGA

SEQ ID NO: 2770 - protein, 9 aa, Homo sapiens
VELEHTLLS

SEQ ID NO: 2771 - protein, 8 aa, Homo sapiens
VELEHTLL

SEQ ID NO: 2772 - protein, 8 aa, Homo sapiens
VENKLVEL

SEQ ID NO: 2773 - protein, 10 aa, Homo sapiens
VNLSMVENKL

SEQ ID NO: 2774 - protein, 9 aa, Homo sapiens
VNLSMVENK

SEQ ID NO: 2775 - protein, 10 aa, Homo sapiens
VRPSSSGLIN

SEQ ID NO: 2776 - protein, 9 aa, Homo sapiens
VRPSSSGLI

SEQ ID NO: 2777 - protein, 8 aa, Homo sapiens
VRPSSSGL

SEQ ID NO: 2778 - protein, 9 aa, Homo sapiens
VYDLSRDIL

SEQ ID NO: 2779 - protein, 8 aa, Homo sapiens
VYDLSRDI

SEQ ID NO: 2780 - protein, 8 aa, Homo sapiens
YLLLASSI

SEQ ID NO: 2781 - protein, 117 aa, Artificial Sequence
  Description of Artificial Sequence: Synthetic polypeptide
QVQLVQSGAEVKKPGASVKVSCKASGGTFSSATISWVRQAPGQGLEWMGWIYPNSGGTVYAQKFQGRVTMTRDTSTSTVYMELSSLRSEDTAVYYCAATEWLGVWGQGTTVTVSSAS

SEQ ID NO: 2782 - protein, 117 aa, Artificial Sequence
  Description of Artificial Sequence: Synthetic polypeptide
EVQLLQSGAEVKKPGSSVKVSCKASGGTFSSYAISWVRQAPGQGLEWMGWINPNSGGTISAPNFQGRVTMTRDTSTSTVYMELSSLRSEDTAVYYCARANWLDYWGQGTLVTVSSAS

SEQ ID NO: 2783 - protein, 117 aa, Artificial Sequence
  Description of Artificial Sequence: Synthetic polypeptide
EVQLLESGAEVKKPGASVKVSCKASGYTFTTYDLAWVRQAPGQGLEWMGWINPNSGGTNYAQKFQGRVTMTRDTSTSTVYMELSSLRSEDTAVYYCARANWLDYWGQGTLVTVSSAS

SEQ ID NO: 2784 - protein, 117 aa, Artificial Sequence
  Description of Artificial Sequence: Synthetic polypeptide
QVQLVQSGAEVKKPGASVKVSCKSSGYSFDSYVVNWVRQAPGQGLEWMGWINPNSGGTNYAQKFQGRVTMTRDTSTSTVYMELSSLRSEDTAVYYCARDWVLDYWGQGTLVTVSSAS

SEQ ID NO: 2785 - protein, 117 aa, Artificial Sequence
  Description of Artificial Sequence: Synthetic polypeptide
QVQLVQSGAEVKKPGASVKVSCKASGYTFTSYGISWVRQAPGQGLEWMGWMNPNSGGTNYAQKFQGRVTMTRDTSTSTVYMELSSLRSEDTAVYYCARGEWLDYWGQGTLVTVSSAS

SEQ ID NO: 2786 - protein, 117 aa, Artificial Sequence
  Description of Artificial Sequence: Synthetic polypeptide
QVQLVQSGAEVKKPGASVKVSCKASGYTFTSYGISWVRQAPGQGLEWMGWINPNSGGTNYAQKFQGRVTMTRDTSTSTVYMELSSLRSEDTAVYYCARGWELGYWGQGTLVTVSSAS

SEQ ID NO: 2787 - protein, 118 aa, Artificial Sequence
  Description of Artificial Sequence: Synthetic polypeptide
QVQLVQSGAEVKKPGASVKVSCKASGYTFTRYTINWVRQAPGQGLEWMGWINPNSGGTNYAQKFQGRVTMTRDTSTSTVYMELSSLRSEDTAVYYCARDFVGYDDWGQGTLVTVSSAS

SEQ ID NO: 2788 - protein, 118 aa, Artificial Sequence
  Description of Artificial Sequence: Synthetic polypeptide
QVQLVQSGAEVKKPGASVKVSCKASGYTFTSYGITWVRQAPGQGLEWMGWINPNSGGTNYAQKFQGRVTMTRDTSTSTVYMELSSLRSEDTAVYYCARDYGDLDYWGQGTLVTVSSAS

SEQ ID NO: 2789 - protein, 118 aa, Artificial Sequence
  Description of Artificial Sequence: Synthetic polypeptide
QVQLVQSGAEVKKPGASVKVSCKASGGTFSNYILSWVRQAPGQGLEWMGWINPDSGGTNYAQKFQGRVTMTRDTSTSTVYMELSSLRSEDTAVYYCARGSYGMDVWGQGTTVTVSSAS

SEQ ID NO: 2790 - protein, 119 aa, Artificial Sequence
  Description of Artificial Sequence: Synthetic polypeptide
QVQLVQSGAEVKKPGASVKVSCKASGYSFTRYNMHWVRQAPGQGLEWMGWINPNSGGTNYAQKFQGRVTMTRDTSTSTVYMELSSLRSEDTAVYYCARDGYSGLDVWGKGTTVTVSSAS

SEQ ID NO: 2791 - protein, 119 aa, Artificial Sequence
  Description of Artificial Sequence: Synthetic polypeptide
QVQLVQSGAEVKKPGASVKVSCKASGGTFSSYAISWVRQAPGQGLEWMGWINPNNGGTNYAQKFQGRVTMTRDTSTSTVYMELSSLRSEDTAVYYCARDSGVGMDVWGQGTTVTVSSAS

SEQ ID NO: 2792 - protein, 120 aa, Artificial Sequence
  Description of Artificial Sequence: Synthetic polypeptide
QVQLVQSGAEVKKPGASVKVSCKASGGTFNNYAFSWVRQAPGQGLEWMGWINPNSGGTNYAQKFQGRVTMTRDTSTSTVYMELSSLRSEDTAVYYCARDGVAVASDYWGQGTLVTVSSAS

SEQ ID NO: 2793 - protein, 120 aa, Artificial Sequence
  Description of Artificial Sequence: Synthetic polypeptide
QVQLVQSGAEVKKPGASVKVSCKASGYTFSSYNMHWVRQAPGQGLEWMGWINGNTGGTNYAQKFQGRVTMTRDTSTSTVYMELSSLRSEDTAVYYCARGVNVDDFDYWGQGTLVTVSSAS

SEQ ID NO: 2794 - protein, 122 aa, Artificial Sequence
  Description of Artificial Sequence: Synthetic polypeptide
QVQLVQSGAEVKKPGASVKVSCKASGGTFSSYAFSWVRQAPGQGLEWMGWINPDTGYTRYAQKFQGRVTMTRDTSTSTVYMELSSLRSEDTAVYYCARGDYTGNWYFDLWGRGTLVTVSSAS

SEQ ID NO: 2795 - protein, 117 aa, Artificial Sequence
  Description of Artificial Sequence: Synthetic polypeptide
EVQLLESGAEVKKPGASVKVSCKASGYTFTSYGISWVRQAPGQGLEWMGWINPYSGGTNYAQKLQGRVTMTRDTSTSTVYMELSSLRSEDTAVYYCARANWLDYWGQGTLVTVSSAS

SEQ ID NO: 2796 - protein, 124 aa, Artificial Sequence
  Description of Artificial Sequence: Synthetic polypeptide
QVQLVQSGAEVKKPGASVKVSCKASGYTFTSYGISWVRQAPGQGLEWMGWISAYNGYTNYAQNLQGRVTMTRDTSTSTVYMELSSLRSEDTAVYYCARDQFYGGNSGGHDYWGQGTLVTVSSAS

SEQ ID NO: 2797 - protein, 115 aa, Artificial Sequence
  Description of Artificial Sequence: Synthetic polypeptide
QVQLVQSGAEVKKPGASVKVSCKASGYTFTDYNMHWVRQAPGQGLEWMGWMNPNSGGTNYAQKFQGRVTMTRDTSTSTVYMELSSLRSEDTAVYYCAREEDYWGQGTLVTVSSAS

SEQ ID NO: 2798 - protein, 117 aa, Artificial Sequence
  Description of Artificial Sequence: Synthetic polypeptide
QVQLVQSGAEVKKPGASVKVSCKASGYTFTRYTINWVRQAPGQGLEWMGWINPNSGGANYAQKFQGRVTMTRDTSTSTVYMELSSLRSEDTAVYYCARGDWFDPWGQGTLVTVSSAS

SEQ ID NO: 2799 - protein, 117 aa, Artificial Sequence
  Description of Artificial Sequence: Synthetic polypeptide
QVQLVQSGAEVKKPGASVKVSCKASGYTFTSYLMHWVRQAPGQGLEWMGWISPNSGGTNYAQKFQGRVTMTRDTSTSTVYMELSSLRSEDTAVYYCARGDWFDPWGQGTLVTVSSAS

SEQ ID NO: 2800 - protein, 117 aa, Artificial Sequence
  Description of Artificial Sequence: Synthetic polypeptide
QVQLVQSGAEVKKPGASVKVSCKASGYTFSDYYVHWVRQAPGQGLEWMGWINPNSGGTNYAQKFQGRVTMTRDTSTSTVYMELSSLRSEDTAVYYCARGEWFDPWGQGTLVTVSSAS

SEQ ID NO: 2801 - protein, 117 aa, Artificial Sequence
  Description of Artificial Sequence: Synthetic polypeptide
QVQLVQSGAEVKKPGASVKVSCKASGYTFTTYYMHWVRQAPGQGLEWMGWINPNSGGTNYAQKFQGRVTMTRDTSTSTVYMELSSLRSEDTAVYYCARSDWFDPWGQGTLVTVSSAS

SEQ ID NO: 2802 - protein, 119 aa, Artificial Sequence
  Description of Artificial Sequence: Synthetic polypeptide
QVQLVQSGAEVKKPGASVKVSCKASGGTFSNYAINWVRQAPGQGLEWMGWISPYSGGTNYAQKFQGRVTMTRDTSTSTVYMELSSLRSEDTAVYYCARDSGSYFDYWGQGTLVTVSLAS

SEQ ID NO: 2803 - protein, 119 aa, Artificial Sequence
  Description of Artificial Sequence: Synthetic polypeptide
QVQLVQSGAEVKKPGASVKVSCKASGYTFTDYYMHWVRQAPGQGLEWMGWIYPNTGGTNYAQKFQGRVTMTRDTSTSTVYMELSSLRSEDTAVYYCARDYGGYVDYWGQGTLVTVSSAS

SEQ ID NO: 2804 - protein, 119 aa, Artificial Sequence
  Description of Artificial Sequence: Synthetic polypeptide
EVQLLESGAEVKKPGASVKVSCKASGYTFTSYAMNWVRQAPGQGLEWMGWMNPNSGGTKYAQKFQGRVTMTRDTSTSTVYMELSSLRSEDTAVYYCAREGPAALDVWGQGTLVTVSSAS

SEQ ID NO: 2805 - protein, 119 aa, Artificial Sequence
  Description of Artificial Sequence: Synthetic polypeptide
QVQLVQSGAEVKKPGASVKVSCKASGYTLTSHLIHWVRQAPGQGLEWMGWINPNSGGTNYAQKFQGRVTMTRDTSTSTVYMELSSLRSEDTAVYYCARERRSGMDVWGQGTTVTVSSAS

SEQ ID NO: 2806 - protein, 119 aa, Artificial Sequence
  Description of Artificial Sequence: Synthetic polypeptide
EVQLLESGAEVKKPGASVKVSCKASGYSFTDYIVHWVRQAPGQGLEWMGWINPYSGGTKYAQKFQGRVTMTRDTSTSTVYMELSSLRSEDTAVYYCARVLQEGMDVWGQGTLVTVSSAS

SEQ ID NO: 2807 - protein, 119 aa, Artificial Sequence
  Description of Artificial Sequence: Synthetic polypeptide
QVQLVQSGAEVKKPGASVKVSCKASGYTFSNFLINWVRQAPGQGLEWMGWINPNSGGTNYAQKFQGRVTMTRDTSTSTVYMELSSLRSEDTAVYYCASERELPFDIWGQGTMVTVSSAS

SEQ ID NO: 2808 - protein, 120 aa, Artificial Sequence
  Description of Artificial Sequence: Synthetic polypeptide
QVQLVQSGAEVKKPGASVKVSCKASGYTFTDYQMFWVRQAPGQGLEWMGWINPNSGGTNYAQKFQGRVTMTRDTSTSTVYMELSSLRSEDTAVYYCAKGGGGYGMDVWGQGTTVTVSSAS

SEQ ID NO: 2809 - protein, 122 aa, Artificial Sequence
  Description of Artificial Sequence: Synthetic polypeptide
QVQLVQSGAEVKKPGASVKVSCKASGGTFSSYAISWVRQAPGQGLEWMGWINPNSGGTNYAQKFQGRVTMTRDTSTSTVYMELSSLRSEDTAVYYCAAMGIAVAGGMDVWGQGTLVTVSSAS

SEQ ID NO: 2810 - protein, 117 aa, Artificial Sequence
  Description of Artificial Sequence: Synthetic polypeptide
QVQLVQSGAEVKKPGASVKVSCKASGYTFTNYHMHWVRQAPGQGLEWMGWIHPDSGGTSYAQKFQGRVTMTRDTSTSTVYMELSSLRSEDTAVYYCARNWNLDYWGQGTLVTVSSAS

SEQ ID NO: 2811 - protein, 118 aa, Artificial Sequence
  Description of Artificial Sequence: Synthetic polypeptide
QVQLVQSGAEVKKPGASVKVSCKASGYTFTGYYMHWVRQAPGQGLEWMGWMNPNSGNTGYAQKFQGRVTMTRDTSTSTVYMELSSLRSEDTAVYYCATYDDGMDVWGQGTTVTVSSAS

SEQ ID NO: 2812 - protein, 119 aa, Artificial Sequence
  Description of Artificial Sequence: Synthetic polypeptide
QVQLVQSGAEVKKPGASVKVSCKASGYTFTSYTVNWVRQAPGQGLEWMGWINPNSGGTKYAQNFQGRVTMTRDTSTSTVYMELSSLRSEDTAVYYCARGGGGALDYWGQGTLVTVSSAS

SEQ ID NO: 2813 - protein, 120 aa, Artificial Sequence
  Description of Artificial Sequence: Synthetic polypeptide
QVQLVQSGAEVKKPGASVKVSCKASGYTFTSYYMHWVRQAPGQGLEWMGMINPRDDTTDYARDFQGRVTMTRDTSTSTVYMELSSLRSEDTAVYYCALSGNYYGMDVWGQGTTVTVSSAS

SEQ ID NO: 2814 - protein, 121 aa, Artificial Sequence
  Description of Artificial Sequence: Synthetic polypeptide
QVQLVQSGAEVKKPGASVKVSCKASGYTFTNYYMHWVRQAPGQGLEWMGMINPSGGGTSYAQKFQGRVTMTRDTSTSTVYMELSSLRSEDTAVYYCARGNPWELRLDYWGQGTLVTVSSAS

SEQ ID NO: 2815 - protein, 120 aa, Artificial Sequence
  Description of Artificial Sequence: Synthetic polypeptide
QVQLVQSGAEVKKPGSSVKVSCKASGYTFTSQYMHWVRQAPGQGLEWMGRIIPLLGIVNYAQKFQGRVTITADESTSTAYMELSSLRSEDTAVYYCARDKNYYGMDVWGQGTTVTVSSAS

SEQ ID NO: 2816 - protein, 107 aa, Artificial Sequence
  Description of Artificial Sequence: Synthetic polypeptide
DIQMTQSPSSLSASVGDRVTITCRASQSISTWLAWYQQKPGKAPKLLIYAASSLRSGVPSRFSGSGSGTDFTLTISSLQPEDFATYYCQQSYNTPYTFGQGTKLEIK

SEQ ID NO: 2817 - protein, 107 aa, Artificial Sequence
  Description of Artificial Sequence: Synthetic polypeptide
DIQMTQSPSSLSASVGDRVTITCRASQSISRWLAWYQQKPGKAPKLLIYAASTVQSGVPSRFSGSGSGTDFTLTISSLQPEDFATYYCQQSYSTPYTFGQGTKLEIK

SEQ ID NO: 2818 - protein, 107 aa, Artificial Sequence
  Description of Artificial Sequence: Synthetic polypeptide
DIQMTQSPSSLSASVGDRVTITCRASQDISRWLAWYQQKPGKAPKLLIYAASRLQAGVPSRFSGSGSGTDFTLTISSLQPEDFATYYCQQSYSTPYSFGQGTKLEIK

SEQ ID NO: 2819 - protein, 107 aa, Artificial Sequence
  Description of Artificial Sequence: Synthetic polypeptide
DIQMTQSPSSLSASVGDRVTITCRASQTISSWLAWYQQKPGKAPKLLIYAASSLQSGVPSRFSGSGSGTDFTLTISSLQPEDFATYYCQQSYSTPFTFGPGTKVDIK

SEQ ID NO: 2820 - protein, 107 aa, Artificial Sequence
  Description of Artificial Sequence: Synthetic polypeptide
DIQMTQSPSSLSASVGDRVTITCRASQTISSWLAWYQQKPGKAPKLLIYAASSLQSGVPSRFSGSGSGTDFTLTISSLQPEDFATYYCQQSYGVPYTFGQGTKVEIK

SEQ ID NO: 2821 - protein, 107 aa, Artificial Sequence
  Description of Artificial Sequence: Synthetic polypeptide
DIQMTQSPSSLSASVGDRVTITCRASQSISNWLAWYQQKPGKAPKLLIYAASSLQSGVPSRFSGSGSGTDFTLTISSLQPEDFATYYCQQSYSAPYTFGPGTKVDIK

SEQ ID NO: 2822 - protein, 107 aa, Artificial Sequence
  Description of Artificial Sequence: Synthetic polypeptide
DIQMTQSPSSLSASVGDRVTITCRASQSVGNWLAWYQQKPGKAPKLLIYGASSLQTGVPSRFSGSGSGTDFTLTISSLQPEDFATYYCQQSYSAPYTFGQGTKVEIK

SEQ ID NO: 2823 - protein, 107 aa, Artificial Sequence
  Description of Artificial Sequence: Synthetic polypeptide
DIQMTQSPSSLSASVGDRVTITCRASQNIGNWLAWYQQKPGKAPKLLIYAASTLQTGVPSRFSGSGSGTDFTLTISSLQPEDFATYYCQQSYSAPYSFGQGTKLEIK

SEQ ID NO: 2824 - protein, 107 aa, Artificial Sequence
  Description of Artificial Sequence: Synthetic polypeptide
DIQMTQSPSSLSASVGDRVTITCRASQSISRWLAWYQQKPGKAPKLLIYAASSLQSGVPSRFSGSGSGTDFTLTISSLQPEDFATYYCQQSYSTPYTFGQGTKLEIK

SEQ ID NO: 2825 - protein, 107 aa, Artificial Sequence
  Description of Artificial Sequence: Synthetic polypeptide
DIQMTQSPSSLSASVGDRVTITCRASQSISSWLAWYQQKPGKAPKLLIYGASSLQSGVPSRFSGSGSGTDFTLTISSLQPEDFATYYCQQSYSVPYSFGQGTKLEIK

SEQ ID NO: 2826 - protein, 107 aa, Artificial Sequence
  Description of Artificial Sequence: Synthetic polypeptide
DIQMTQSPSSLSASVGDRVTITCRASQSISKWLAWYQQKPGKAPKLLIYAASSLQSGVPSRFSGSGSGTDFTLTISSLQPEDFATYYCQQSYSAPYTFGQGTKVEIK

SEQ ID NO: 2827 - protein, 107 aa, Artificial Sequence
  Description of Artificial Sequence: Synthetic polypeptide
DIQMTQSPSSLSASVGDRVTITCRASQGISNYLAWYQQKPGKAPKLLIYAASTLQSGVPSRFSGSGSGTDFTLTISSLQPEDFATYYCQQSYSVPYSFGQGTKLEIK

SEQ ID NO: 2828 - protein, 107 aa, Artificial Sequence
  Description of Artificial Sequence: Synthetic polypeptide
DIQMTQSPSSLSASVGDRVTITCRASQTISNYLNWYQQKPGKAPKLLIYAASNLQSGVPSRFSGSGSGTDFTLTISSLQPEDFATYYCQQSYSTPQTFGQGTKVEIK

SEQ ID NO: 2829 - protein, 107 aa, Artificial Sequence
  Description of Artificial Sequence: Synthetic polypeptide
DIQMTQSPSSLSASVGDRVTITCRASRDIGRAVGWYQQKPGKAPKLLIYAASSLQSGVPSRFSGSGSGTDFTLTISSLQPEDFATYYCQQLDSYPFTFGPGTKVDIK

SEQ ID NO: 2830 - protein, 107 aa, Artificial Sequence
  Description of Artificial Sequence: Synthetic polypeptide
DIQMTQSPSSLSASVGDRVTITCRASQSISSWLAWYQQKPGKAPKLLIYAASTLQSGVPSRFSGSGSGTDFTLTISSLQPEDFATYYCQQSYSSPYTFGPGTKVDIK

SEQ ID NO: 2831 - protein, 107 aa, Artificial Sequence
  Description of Artificial Sequence: Synthetic polypeptide
DIQMTQSPSSLSASVGDRVTITCQASQDISNYLNWYQQKPGKAPKLLIYAASSLQSGVPSRFSGSGSGTDFTLTISSLQPEDFATYYCQQSYSTPLTFGGGTKLEIK

SEQ ID NO: 2832 - protein, 107 aa, Artificial Sequence
  Description of Artificial Sequence: Synthetic polypeptide
DIQMTQSPSSLSASVGDRVTITCRASQSIGRWLAWYQQKPGKAPKLLIYAASSLQSGVPSRFSGSGSGTDFTLTISSLQPEDFATYYCQQSYSTPYSFGQGTKVEIK

SEQ ID NO: 2833 - protein, 107 aa, Artificial Sequence
  Description of Artificial Sequence: Synthetic polypeptide
DIQMTQSPSSLSASVGDRVTITCRASQSISTWLAWYQQKPGKAPKLLIYAASTLQSGVPSRFSGSGSGTDFTLTISSLQPEDFATYYCQQSYSTPYTFAQGTKLEIK

SEQ ID NO: 2834 - protein, 107 aa, Artificial Sequence
  Description of Artificial Sequence: Synthetic polypeptide
DIQMTQSPSSLSASVGDRVTITCQASQDISNYLNWYQQKPGKAPKLLIYGASRLQSGVPSRFSGSGSGTDFTLTISSLQPEDFATYYCQQSYSTPYTFGQGTKLEIK

SEQ ID NO: 2835 - protein, 107 aa, Artificial Sequence
  Description of Artificial Sequence: Synthetic polypeptide
DIQMTQSPSSLSASVGDRVTITCRASQSISSWLAWYQQKPGKAPKLLIYAASTLQSGVPSRFSGSGSGTDFTLTISSLQPEDFATYYCQQSYSTPFTFGPGTKVDIK

SEQ ID NO: 2836 - protein, 106 aa, Artificial Sequence
  Description of Artificial Sequence: Synthetic polypeptide
DIQMTQSPSSLSASVGDRVTITCRASQSVSNWLAWYQQKPGKAPKLLIYAASSLQSGVPSRFSGSGSGTDFTLTISSLQPEDFATYYCQQSYSTPTFGQGTKLEIK

SEQ ID NO: 2837 - protein, 107 aa, Artificial Sequence
  Description of Artificial Sequence: Synthetic polypeptide
DIQMTQSPSSLSASVGDRVTITCQASQDISNYLNWYQQKPGKAPKLLIYAASTLQSGVPSRFSGSGSGTDFTLTISSLQPEDFATYYCQQTYAIPLTFGGGTKVEIK

SEQ ID NO: 2838 - protein, 107 aa, Artificial Sequence
  Description of Artificial Sequence: Synthetic polypeptide
DIQMTQSPSSLSASVGDRVTITCQASQDIGSWLAWYQQKPGKAPKLLIYATSSLQSGVPSRFSGSGSGTDFTLTISSLQPEDFATYYCQQSYSTPYTFGQGTKLEIK

SEQ ID NO: 2839 - protein, 107 aa, Artificial Sequence
  Description of Artificial Sequence: Synthetic polypeptide
DIQMTQSPSSLSASVGDRVTITCRASQGISRWLAWYQQKPGKAPKLLIYAASTLQPGVPSRFSGSGSGTDFTLTISSLQPEDFATYYCQQSYIAPFTFGPGTKVDIK

SEQ ID NO: 2840 - protein, 107 aa, Artificial Sequence
  Description of Artificial Sequence: Synthetic polypeptide
DIQMTQSPSSLSASVGDRVTITCRASQGISNYLAWYQQKPGKAPKLLIYAASRLESGVPSRFSGSGSGTDFTLTISSLQPEDFATYYCQQSYSIPLTFGGGTKVEIK

SEQ ID NO: 2841 - protein, 106 aa, Artificial Sequence
  Description of Artificial Sequence: Synthetic polypeptide
DIQMTQSPSSLSASVGDRVTITCRASQSISSYLNWYQQKPGKAPKLLIYGVSSLQSGVPSRFSGSGSGTDFTLTISSLQPEDFATYYCQQSYSNPTFGQGTKVEIK

SEQ ID NO: 2842 - protein, 107 aa, Artificial Sequence
  Description of Artificial Sequence: Synthetic polypeptide
DIQMTQSPSSLSASVGDRVTITCRASQSISSWVAWYQQKPGKAPKLLIYGASNLESGVPSRFSGSGSGTDFTLTISSLQPEDFATYYCQQSYSTPYSFGQGTKLEIK

SEQ ID NO: 2843 - protein, 107 aa, Artificial Sequence
  Description of Artificial Sequence: Synthetic polypeptide
DIQMTQSPSSLSASVGDRVTITCRASQGISNYLAWYQQKPGKAPKLLIYAASSLQSGVPSRFSGSGSGTDFTLTISSLQPEDFATYYCQQSYSDQWTFGQGTKVEIK

SEQ ID NO: 2844 - protein, 107 aa, Artificial Sequence
  Description of Artificial Sequence: Synthetic polypeptide
DIQMTQSPSSLSASVGDRVTITCRASQSISRWLAWYQQKPGKAPKLLIYAASSLQSGVPSRFSGSGSGTDFTLTISSLQPEDFATYYCQQSYLPPYSFGQGTKVEIK

SEQ ID NO: 2845 - protein, 107 aa, Artificial Sequence
  Description of Artificial Sequence: Synthetic polypeptide
DIQMTQSPSSLSASVGDRVTITCRASQSISNWLAWYQQKPGKAPKLLIYAASSLQSGVPSRFSGSGSGTYFTLTISSLQPEDFATYYCQQSYSSPYTFGQGTKLEIK

SEQ ID NO: 2846 - protein, 107 aa, Artificial Sequence
  Description of Artificial Sequence: Synthetic polypeptide
DIQMTQSPSSLSASVGDRVTITCRASQSISHYLNWYQQKPGKAPKLLIYGASSLQSGVPSRFSGSGSGTDFTLTISSLQPEDFATYYCQQSYTTPWTFGQGTRLEIK

SEQ ID NO: 2847 - protein, 107 aa, Artificial Sequence
  Description of Artificial Sequence: Synthetic polypeptide
DIQMTQSPSSLSASVGDRVTITCRASQSISSWLAWYQQKPGKAPKLLIYAASTLQSGVPSRFSGSGSGTDFTLTISSLQPEDFATYYCQQSYLPPYSFGQGTKLEIK

SEQ ID NO: 2848 - protein, 105 aa, Artificial Sequence
  Description of Artificial Sequence: Synthetic polypeptide
DIQMTQSPSSLSASVGDRVTITCQASQDISNYLNWYQQKPGKAPKLLIYGASRLQSGVPSRFSGSGSGTDFTLTISSLQPEDFATYYCQEGITYTFGQGTKVEIK

SEQ ID NO: 2849 - protein, 107 aa, Artificial Sequence
  Description of Artificial Sequence: Synthetic polypeptide
DIQMTQSPSSLSASVGDRVTITCQASQDISNYLNWYQQKPGKAPKLLIYAASSLQSGVPSRFSGSGSGTDFTLTISSLQPEDFATYYCQQYYSYPFTFGPGTKVDIK

SEQ ID NO: 2850 - protein, 107 aa, Artificial Sequence
  Description of Artificial Sequence: Synthetic polypeptide
EIVMTQSPATLSVSPGERATLSCRASQSVSRNLAWYQQKPGQAPRLLIYGASTRATGIPARFSGSGSGTEFTLTISSLQSEDFAVYYCQHYGYSPVTFGQGTKLEIK

SEQ ID NO: 2851 - protein, 9 aa, Artificial Sequence
  Description of Artificial Sequence: Synthetic peptide
GTFSSATIS

SEQ ID NO: 2852 - protein, 9 aa, Artificial Sequence
  Description of Artificial Sequence: Synthetic peptide
GTFSSYAIS

SEQ ID NO: 2853 - protein, 9 aa, Artificial Sequence
  Description of Artificial Sequence: Synthetic peptide
YTFTTYDLA

SEQ ID NO: 2854 - protein, 9 aa, Artificial Sequence
  Description of Artificial Sequence: Synthetic peptide
YSFDSYVVN

SEQ ID NO: 2855 - protein, 9 aa, Artificial Sequence
  Description of Artificial Sequence: Synthetic peptide
YTFTSYGIS

SEQ ID NO: 2856 - protein, 9 aa, Artificial Sequence
  Description of Artificial Sequence: Synthetic peptide
YTFTRYTIN

SEQ ID NO: 2857 - protein, 9 aa, Artificial Sequence
  Description of Artificial Sequence: Synthetic peptide
YTFTSYGIT

SEQ ID NO: 2858 - protein, 9 aa, Artificial Sequence
  Description of Artificial Sequence: Synthetic peptide
GTFSNYILS

SEQ ID NO: 2859 - protein, 9 aa, Artificial Sequence
  Description of Artificial Sequence: Synthetic peptide
YSFTRYNMH

SEQ ID NO: 2860 - protein, 9 aa, Artificial Sequence
  Description of Artificial Sequence: Synthetic peptide
GTFNNYAFS

SEQ ID NO: 2861 - protein, 9 aa, Artificial Sequence
  Description of Artificial Sequence: Synthetic peptide
YTFSSYNMH

SEQ ID NO: 2862 - protein, 9 aa, Artificial Sequence
  Description of Artificial Sequence: Synthetic peptide
GTFSSYAFS

SEQ ID NO: 2863 - protein, 9 aa, Artificial Sequence
  Description of Artificial Sequence: Synthetic peptide
YTFTDYNMH

SEQ ID NO: 2864 - protein, 9 aa, Artificial Sequence
  Description of Artificial Sequence: Synthetic peptide
YTFTSYLMH

SEQ ID NO: 2865 - protein, 9 aa, Artificial Sequence
  Description of Artificial Sequence: Synthetic peptide
YTFSDYYVH

SEQ ID NO: 2866 - protein, 9 aa, Artificial Sequence
  Description of Artificial Sequence: Synthetic peptide
YTFTTYYMH

SEQ ID NO: 2867 - protein, 9 aa, Artificial Sequence
  Description of Artificial Sequence: Synthetic peptide
GTFSNYAIN

SEQ ID NO: 2868 - protein, 9 aa, Artificial Sequence
  Description of Artificial Sequence: Synthetic peptide
YTFTDYYMH

SEQ ID NO: 2869 - protein, 9 aa, Artificial Sequence
  Description of Artificial Sequence: Synthetic peptide
YTFTSYAMN

SEQ ID NO: 2870 - protein, 9 aa, Artificial Sequence
  Description of Artificial Sequence: Synthetic peptide
YTLTSHLIH

SEQ ID NO: 2871 - protein, 9 aa, Artificial Sequence
  Description of Artificial Sequence: Synthetic peptide
YSFTDYIVH

SEQ ID NO: 2872 - protein, 9 aa, Artificial Sequence
  Description of Artificial Sequence: Synthetic peptide
YTFSNFLIN

SEQ ID NO: 2873 - protein, 9 aa, Artificial Sequence
  Description of Artificial Sequence: Synthetic peptide
YTFTDYQMF

SEQ ID NO: 2874 - protein, 9 aa, Artificial Sequence
  Description of Artificial Sequence: Synthetic peptide
YTFTNYHMH

SEQ ID NO: 2875 - protein, 9 aa, Artificial Sequence
  Description of Artificial Sequence: Synthetic peptide
YTFTGYYMH

SEQ ID NO: 2876 - protein, 9 aa, Artificial Sequence
  Description of Artificial Sequence: Synthetic peptide
YTFTSYTVN

SEQ ID NO: 2877 - protein, 9 aa, Artificial Sequence
  Description of Artificial Sequence: Synthetic peptide
YTFTSYYMH

SEQ ID NO: 2878 - protein, 9 aa, Artificial Sequence
  Description of Artificial Sequence: Synthetic peptide
YTFTNYYMH

SEQ ID NO: 2879 - protein, 9 aa, Artificial Sequence
  Description of Artificial Sequence: Synthetic peptide
YTFTSQYMH

SEQ ID NO: 2880 - protein, 13 aa, Artificial Sequence
  Description of Artificial Sequence: Synthetic peptide
GWIYPNSGGTVYA

SEQ ID NO: 2881 - protein, 13 aa, Artificial Sequence
  Description of Artificial Sequence: Synthetic peptide
GWINPNSGGTISA

SEQ ID NO: 2882 - protein, 13 aa, Artificial Sequence
  Description of Artificial Sequence: Synthetic peptide
GWINPNSGGTNYA

SEQ ID NO: 2883 - protein, 13 aa, Artificial Sequence
  Description of Artificial Sequence: Synthetic peptide
GWMNPNSGGTNYA

SEQ ID NO: 2884 - protein, 13 aa, Artificial Sequence
  Description of Artificial Sequence: Synthetic peptide
GWINPDSGGTNYA

SEQ ID NO: 2885 - protein, 13 aa, Artificial Sequence
  Description of Artificial Sequence: Synthetic peptide
GWINPNNGGTNYA

SEQ ID NO: 2886 - protein, 13 aa, Artificial Sequence
  Description of Artificial Sequence: Synthetic peptide
GWINGNTGGTNYA

SEQ ID NO: 2887 - protein, 13 aa, Artificial Sequence
  Description of Artificial Sequence: Synthetic peptide
GWINPDTGYTRYA

SEQ ID NO: 2888 - protein, 13 aa, Artificial Sequence
  Description of Artificial Sequence: Synthetic peptide
GWINPYSGGTNYA

SEQ ID NO: 2889 - protein, 13 aa, Artificial Sequence
  Description of Artificial Sequence: Synthetic peptide
GWISAYNGYTNYA

SEQ ID NO: 2890 - protein, 13 aa, Artificial Sequence
  Description of Artificial Sequence: Synthetic peptide
GWINPNSGGANYA

SEQ ID NO: 2891 - protein, 13 aa, Artificial Sequence
  Description of Artificial Sequence: Synthetic peptide
GWISPNSGGTNYA

SEQ ID NO: 2892 - protein, 13 aa, Artificial Sequence
  Description of Artificial Sequence: Synthetic peptide
GWISPYSGGTNYA

SEQ ID NO: 2893 - protein, 13 aa, Artificial Sequence
  Description of Artificial Sequence: Synthetic peptide
GWIYPNTGGTNYA

SEQ ID NO: 2894 - protein, 13 aa, Artificial Sequence
  Description of Artificial Sequence: Synthetic peptide
GWMNPNSGGTKYA

SEQ ID NO: 2895 - protein, 13 aa, Artificial Sequence
  Description of Artificial Sequence: Synthetic peptide
GWINPYSGGTKYA

SEQ ID NO: 2896 - protein, 13 aa, Artificial Sequence
  Description of Artificial Sequence: Synthetic peptide
GWIHPDSGGTSYA

SEQ ID NO: 2897 - protein, 13 aa, Artificial Sequence
  Description of Artificial Sequence: Synthetic peptide
GWMNPNSGNTGYA

SEQ ID NO: 2898 - protein, 13 aa, Artificial Sequence
  Description of Artificial Sequence: Synthetic peptide
GWINPNSGGTKYA

SEQ ID NO: 2899 - protein, 13 aa, Artificial Sequence
  Description of Artificial Sequence: Synthetic peptide
GMINPRDDTTDYA

SEQ ID NO: 2900 - protein, 13 aa, Artificial Sequence
  Description of Artificial Sequence: Synthetic peptide
GMINPSGGGTSYA

SEQ ID NO: 2901 - protein, 13 aa, Artificial Sequence
  Description of Artificial Sequence: Synthetic peptide
GRIIPLLGIVNYA

SEQ ID NO: 2902 - protein, 10 aa, Artificial Sequence
  Description of Artificial Sequence: Synthetic peptide
CAATEWLGVW

SEQ ID NO: 2903 - protein, 10 aa, Artificial Sequence
  Description of Artificial Sequence: Synthetic peptide
CARANWLDYW

SEQ ID NO: 2904 - protein, 10 aa, Artificial Sequence
  Description of Artificial Sequence: Synthetic peptide
CARDWVLDYW

SEQ ID NO: 2905 - protein, 10 aa, Artificial Sequence
  Description of Artificial Sequence: Synthetic peptide
CARGEWLDYW

SEQ ID NO: 2906 - protein, 10 aa, Artificial Sequence
  Description of Artificial Sequence: Synthetic peptide
CARGWELGYW

SEQ ID NO: 2907 - protein, 11 aa, Artificial Sequence
  Description of Artificial Sequence: Synthetic peptide
CARDFVGYDDW

SEQ ID NO: 2908 - protein, 11 aa, Artificial Sequence
  Description of Artificial Sequence: Synthetic peptide
CARDYGDLDYW

SEQ ID NO: 2909 - protein, 11 aa, Artificial Sequence [sequence omitted]

SEQ ID NO: 2910 - protein, 12 aa, Artificial Sequence
  Description of Artificial Sequence: Synthetic peptide
CARDGYSGLDVW

SEQ ID NO: 2911 - protein, 12 aa, Artificial Sequence
  Description of Artificial Sequence: Synthetic peptide
CARDSGVGMDVW

SEQ ID NO: 2912 - protein, 13 aa, Artificial Sequence
  Description of Artificial Sequence: Synthetic peptide
CARDGVAVASDYW

SEQ ID NO: 2913 - protein, 13 aa, Artificial Sequence
  Description of Artificial Sequence: Synthetic peptide
CARGVNVDDFDYW

SEQ ID NO: 2914 - protein, 15 aa, Artificial Sequence
  Description of Artificial Sequence: Synthetic peptide
CARGDYTGNWYFDLW

SEQ ID NO: 2915 - protein, 17 aa, Artificial Sequence
  Description of Artificial Sequence: Synthetic peptide
CARDQFYGGNSGGHDYW

SEQ ID NO: 2916 - protein, 8 aa, Artificial Sequence
  Description of Artificial Sequence: Synthetic peptide
CAREEDYW

SEQ ID NO: 2917 - protein, 10 aa, Artificial Sequence [sequence omitted]

SEQ ID NO: 2918 - protein, 10 aa, Artificial Sequence [sequence omitted]

SEQ ID NO: 2919 - protein, 10 aa, Artificial Sequence [sequence omitted]

SEQ ID NO: 2920 - protein, 12 aa, Artificial Sequence [sequence omitted]

SEQ ID NO: 2921 - protein, 12 aa, Artificial Sequence
  Description of Artificial Sequence: Synthetic peptide
CARDYGGYVDYW

SEQ ID NO: 2922 - protein, 12 aa, Artificial Sequence
  Description of Artificial Sequence: Synthetic peptide
CAREGPAALDVW

SEQ ID NO: 2923 - protein, 12 aa, Artificial Sequence
  Description of Artificial Sequence: Synthetic peptide
CARERRSGMDVW

SEQ ID NO: 2924 - protein, 12 aa, Artificial Sequence
  Description of Artificial Sequence: Synthetic peptide
CARVLQEGMDVW

SEQ ID NO: 2925 - protein, 12 aa, Artificial Sequence
  Description of Artificial Sequence: Synthetic peptide
CASERELPFDIW

SEQ ID NO: 2926 - protein, 13 aa, Artificial Sequence
  Description of Artificial Sequence: Synthetic peptide
CAKGGGGYGMDVW

SEQ ID NO: 2927 - protein, 15 aa, Artificial Sequence
  Description of Artificial Sequence: Synthetic peptide
CAAMGIAVAGGMDVW

SEQ ID NO: 2928 - protein, 10 aa, Artificial Sequence [sequence omitted]

SEQ ID NO: 2929 - protein, 11 aa, Artificial Sequence
  Description of Artificial Sequence: Synthetic peptide
CATYDDGMDVW

SEQ ID NO: 2930 - protein, 12 aa, Artificial Sequence
  Description of Artificial Sequence: Synthetic peptide
CARGGGGALDYW

SEQ ID NO: 2931 - protein, 13 aa, Artificial Sequence
  Description of Artificial Sequence: Synthetic peptide
CALSGNYYGMDVW

SEQ ID NO: 2932 - protein, 14 aa, Artificial Sequence
  Description of Artificial Sequence: Synthetic peptide
CARGNPWELRLDYW

SEQ ID NO: 2933 - protein, 13 aa, Artificial Sequence
  Description of Artificial Sequence: Synthetic peptide
CARDKNYYGMDVW

SEQ ID NO: 2934 - protein, 11 aa, Artificial Sequence
  Description of Artificial Sequence: Synthetic peptide
RASQSISTWLA

SEQ ID NO: 2935 - protein, 11 aa, Artificial Sequence
  Description of Artificial Sequence: Synthetic peptide
RASQSISRWLA

SEQ ID NO: 2936 - protein, 11 aa, Artificial Sequence
  Description of Artificial Sequence: Synthetic peptide
RASQDISRWLA

SEQ ID NO: 2937 - protein, 11 aa, Artificial Sequence
  Description of Artificial Sequence: Synthetic peptide
RASQTISSWLA

SEQ ID NO: 2938 - protein, 11 aa, Artificial Sequence
  Description of Artificial Sequence: Synthetic peptide
RASQSISNWLA

SEQ ID NO: 2939 - protein, 11 aa, Artificial Sequence
  Description of Artificial Sequence: Synthetic peptide
RASQSVGNWLA

SEQ ID NO: 2940 - protein, 11 aa, Artificial Sequence
  Description of Artificial Sequence: Synthetic peptide
RASQNIGNWLA

SEQ ID NO: 2941 - protein, 11 aa, Artificial Sequence
  Description of Artificial Sequence: Synthetic peptide
RASQSISSWLA

SEQ ID NO: 2942 - protein, 11 aa, Artificial Sequence
  Description of Artificial Sequence: Synthetic peptide
RASQSISKWLA

SEQ ID NO: 2943 - protein, 11 aa, Artificial Sequence
  Description of Artificial Sequence: Synthetic peptide
RASQGISNYLA

SEQ ID NO: 2944 - protein, 11 aa, Artificial Sequence
  Description of Artificial Sequence: Synthetic peptide
RASQTISNYLN

SEQ ID NO: 2945 - protein, 11 aa, Artificial Sequence
  Description of Artificial Sequence: Synthetic peptide
RASRDIGRAVG

SEQ ID NO: 2946 - protein, 11 aa, Artificial Sequence
  Description of Artificial Sequence: Synthetic peptide
QASQDISNYLN

SEQ ID NO: 2947 - protein, 11 aa, Artificial Sequence
  Description of Artificial Sequence: Synthetic peptide
RASQSIGRWLA

SEQ ID NO: 2948 - protein, 11 aa, Artificial Sequence
  Description of Artificial Sequence: Synthetic peptide
RASQSVSNWLA

SEQ ID NO: 2949 - protein, 11 aa, Artificial Sequence
  Description of Artificial Sequence: Synthetic peptide
QASQDIGSWLA

SEQ ID NO: 2950 - protein, 11 aa, Artificial Sequence
  Description of Artificial Sequence: Synthetic peptide
RASQGISRWLA

SEQ ID NO: 2951 - protein, 11 aa, Artificial Sequence
  Description of Artificial Sequence: Synthetic peptide
RASQSISSYLN

SEQ ID NO: 2952 - protein, 11 aa, Artificial Sequence
  Description of Artificial Sequence: Synthetic peptide
RASQSISSWVA

SEQ ID NO: 2953 - protein, 11 aa, Artificial Sequence
  Description of Artificial Sequence: Synthetic peptide
RASQSISHYLN

SEQ ID NO: 2954 - protein, 11 aa, Artificial Sequence
  Description of Artificial Sequence: Synthetic peptide
RASQSVSRNLA

SEQ ID NO: 2955 - protein, 7 aa, Artificial Sequence
  Description of Artificial Sequence: Synthetic peptide
AASSLRS

SEQ ID NO: 2956 - protein, 7 aa, Artificial Sequence
  Description of Artificial Sequence: Synthetic peptide
AASTVQS

SEQ ID NO: 2957 - protein, 7 aa, Artificial Sequence
  Description of Artificial Sequence: Synthetic peptide
AASRLQA

SEQ ID NO: 2958 - protein, 7 aa, Artificial Sequence
  Description of Artificial Sequence: Synthetic peptide
AASSLQS

SEQ ID NO: 2959 - protein, 7 aa, Artificial Sequence
  Description of Artificial Sequence: Synthetic peptide
GASSLQT

SEQ ID NO: 2960 - protein, 7 aa, Artificial Sequence
  Description of Artificial Sequence: Synthetic peptide
AASTLQT

SEQ ID NO: 2961 - protein, 7 aa, Artificial Sequence
  Description of Artificial Sequence: Synthetic peptide
GASSLQS

SEQ ID NO: 2962 - protein, 7 aa, Artificial Sequence
  Description of Artificial Sequence: Synthetic peptide
AASTLQS

SEQ ID NO: 2963 - protein, 7 aa, Artificial Sequence
  Description of Artificial Sequence: Synthetic peptide
AASNLQS

SEQ ID NO: 2964 - protein, 7 aa, Artificial Sequence
  Description of Artificial Sequence: Synthetic peptide
GASRLQS

SEQ ID NO: 2965 - protein, 7 aa, Artificial Sequence
  Description of Artificial Sequence: Synthetic peptide
ATSSLQS

SEQ ID NO: 2966 - protein, 7 aa, Artificial Sequence
  Description of Artificial Sequence: Synthetic peptide
AASTLQP

SEQ ID NO: 2967 - protein, 7 aa, Artificial Sequence
  Description of Artificial Sequence: Synthetic peptide
AASRLES

SEQ ID NO: 2968 - protein, 7 aa, Artificial Sequence
  Description of Artificial Sequence: Synthetic peptide
GVSSLQS

SEQ ID NO: 2969 - protein, 7 aa, Artificial Sequence
  Description of Artificial Sequence: Synthetic peptide
GASNLES

SEQ ID NO: 2970 - protein, 7 aa, Artificial Sequence
  Description of Artificial Sequence: Synthetic peptide
GASTRAT

SEQ ID NO: 2971 - protein, 11 aa, Artificial Sequence [sequence omitted]

SEQ ID NO: 2972 - protein, 11 aa, Artificial Sequence [sequence omitted]

SEQ ID NO: 2973 - protein, 11 aa, Artificial Sequence [sequence omitted]

SEQ ID NO: 2974 - protein, 11 aa, Artificial Sequence [sequence omitted]

SEQ ID NO: 2975 - protein, 11 aa, Artificial Sequence
  Description of Artificial Sequence: Synthetic peptide
CQQSYGVPYTF

SEQ ID NO: 2976 - protein, 11 aa, Artificial Sequence [sequence omitted]

SEQ ID NO: 2977 - protein, 11 aa, Artificial Sequence [sequence omitted]

SEQ ID NO: 2978 - protein, 11 aa, Artificial Sequence [sequence omitted]

SEQ ID NO: 2979 - protein, 11 aa, Artificial Sequence [sequence omitted]

SEQ ID NO: 2980 - protein, 11 aa, Artificial Sequence [sequence omitted]

SEQ ID NO: 2981 - protein, 11 aa, Artificial Sequence [sequence omitted]

SEQ ID NO: 2982 - protein, 11 aa, Artificial Sequence [sequence omitted]

SEQ ID NO: 2983 - protein, 10 aa, Artificial Sequence [sequence omitted]

SEQ ID NO: 2984 - protein, 11 aa, Artificial Sequence
  Description of Artificial Sequence: Synthetic peptide
CQQTYAIPLTF

SEQ ID NO: 2985 - protein, 11 aa, Artificial Sequence [sequence omitted]

SEQ ID NO: 2986 - protein, 11 aa, Artificial Sequence [sequence omitted]

SEQ ID NO: 2987 - protein, 10 aa, Artificial Sequence [sequence omitted]

SEQ ID NO: 2988 - protein, 11 aa, Artificial Sequence
  Description of Artificial Sequence: Synthetic peptide
CQQSYSDQWTF

SEQ ID NO: 2989 - protein, 11 aa, Artificial Sequence
  Description of Artificial Sequence: Synthetic peptide
CQQSYLPPYSF

SEQ ID NO: 2990 - protein, 11 aa, Artificial Sequence [sequence omitted]

SEQ ID NO: 2991 - protein, 9 aa, Artificial Sequence
  Description of Artificial Sequence: Synthetic peptide
CQEGITYTF

SEQ ID NO: 2992 - protein, 11 aa, Artificial Sequence [sequence omitted]

SEQ ID NO: 2993 - protein, 11 aa, Artificial Sequence
  Description of Artificial Sequence: Synthetic peptide
CQHYGYSPVTF

SEQ ID NO: 2994 - protein, 122 aa, Artificial Sequence
  Description of Artificial Sequence: Synthetic polypeptide
QVQLVQSGAEVKKPGASVKVSCKASGGTFSNYGISWVRQAPGQGLEWMGIINPGGSTSYAQKFQGRVTMTRDTSTSTVYMELSSLRSEDTAVYYCARDGYDFWSGYTSDDYWGQGTLVTVSS

SEQ ID NO: 2995 - protein, 114 aa, Artificial Sequence
  Description of Artificial Sequence: Synthetic polypeptide
EVQLLESGGGLVQPGGSLRLSCAASGFTFSSYAMHWVRQAPGKGLEWVSGISGSGGSTYYADSVKGRFTISRDNSKNTLYLQMNSLRAEDTAVYYCASDYGDYRGQGTLVTVSS

SEQ ID NO: 2996 - protein, 125 aa, Artificial Sequence
  Description of Artificial Sequence: Synthetic polypeptide
QVQLVQSGAEVKKPGASVKVSCKASGYTFSNYYIHWVRQAPGQGLEWMGWLNPNSGNTGYAQRFQGRVTMTRDTSTSTVYMELSSLRSEDTAVYYCARDLMTTVVTPGDYGMDVWGQGTTVTVSS

SEQ ID NO: 2997 - protein, 119 aa, Artificial Sequence
  Description of Artificial Sequence: Synthetic polypeptide
QVQLVQSGAEVKKPGASMKVSCKASGYTFTTDGISWVRQAPGQGLEWMGRIYPHSGYTEYAKKFKGRVTMTRDTSTSTVYMELSSLRSEDTAVYYCARQDGGAFAFDIWGQGTMVTVSS

SEQ ID NO: 2998 - protein, 119 aa, Artificial Sequence
  Description of Artificial Sequence: Synthetic polypeptide
QVQLVQSGAEVKKPGASVKVSCKASGYTFTSQYMHWVRQAPGQGLEWMGWISPNNGDTNYAQKFQGRVTMTRDTSTSTVYMELSSLRSEDTAVYYCARELGYYYGMDVWGQGTTVTVSS

SEQ ID NO: 2999 - protein, 124 aa, Artificial Sequence
  Description of Artificial Sequence: Synthetic polypeptide
QVQLVQSGAEVKKPGSSVKVSCKASRYTFTSYDINWVRQAPGQGLEWMGRIIPMLNIANYAPKFQGRVTITADESTSTAYMELSSLRSEDTAVYYCARALIFGVPLLPYGMDVWGQGTTVTVSS

SEQ ID NO: 3000 - protein, 125 aa, Artificial Sequence
  Description of Artificial Sequence: Synthetic polypeptide
EVQLLQSGGGLVQPGGSLRLSCAASGFTFSSSWMHWVRQAPGKGLEWVSFISTSSGYIYYADSVKGRFTISRDNSKNTLYLQMNSLRAEDTAVYYCAKDLATVGEPYYYYGMDVWGQGTTVTVSS

SEQ ID NO: 3001 - protein, 125 aa, Artificial Sequence
  Description of Artificial Sequence: Synthetic polypeptide
QVQLVQSGAEVKKPGSSVKVSCKASGDTFNTYALSWVRQAPGQGLEWMGWMNPNSGNAGYAQKFQGRVTITADESTSTAYMELSSLRSEDTAVYYCARLWFGELHYYYYYGMDVWGQGTMVTVSS

SEQ ID NO: 3002 - protein, 107 aa, Artificial Sequence
  Description of Artificial Sequence: Synthetic polypeptide
EIVMTQSPATLSVSPGERATLSCRASQSVSSSNLAWYQQKPGQAPRLLIYGASTRATGIPARFSGSGSGTEFTLTISSLQSEDFAVYYCHHYGRSHTFGQGTKVEIK

SEQ ID NO: 3003 - protein, 107 aa, Artificial Sequence
  Description of Artificial Sequence: Synthetic polypeptide
DIQMTQSPSSLSASVGDRVTITCRASQDIRNDLGWYQQKPGKAPKLLIYAASSLQSGVPSRFSGSGSGTDFTLTISSLQPEDFATYYCQQANAFPPTFGQGTKVEIK

SEQ ID NO: 3004 - protein, 113 aa, Artificial Sequence
  Description of Artificial Sequence: Synthetic polypeptide
DIVMTQSPDSLAVSLGERATINCKSSQSVFYSSNNKNQLAWYQQKPGQPPKLLIYWASTRESGVPDRFSGSGSGTDFTLTISSLQAEDVAVYYCQQYYSIPLTFGQGTKLEIK

SEQ ID NO: 3005 - protein, 107 aa, Artificial Sequence
  Description of Artificial Sequence: Synthetic polypeptide
DIQMTQSPSSLSASVGDRVTITCQASQDIFKYLNWYQQKPGKAPKLLIYAASTLQSGVPSRFSGSGSGTDFTLTISSLQPEDFATYYCQQSYSTPPTFGQGTRLEIK

SEQ ID NO: 3006 - protein, 107 aa, Artificial Sequence
  Description of Artificial Sequence: Synthetic polypeptide
DIQMTQSPSSLSASVGDRVTITCRASQSISTWLAWYQQKPGKAPKLLIYYASSLQSGVPSRFSGSGSGTDFTLTISSLQPEDFATYYCQQSYSFPYTFGQGTKVEIK

SEQ ID NO: 3007 - protein, 112 aa, Artificial Sequence
  Description of Artificial Sequence: Synthetic polypeptide
DIVMTQSPLSLPVTPGEPASISCSSSQSLLHSNGYNYLDWYLQKPGQSPQLLIYLGSNRASGVPDRFSGSGSGTDFTLKISRVEAEDVGVYYCMQALQTPLTFGGGTKVEIK

SEQ ID NO: 3008 - protein, 107 aa, Artificial Sequence
  Description of Artificial Sequence: Synthetic polypeptide
DIQMTQSPSSLSASVGDRVTITCQASQDISNYLNWYQQKPGKAPKLLIYSASNLRSGVPSRFSGSGSGTDFTLTISSLQPEDFATYYCQQGNTFPLTFGQGTKVEIK

SEQ ID NO: 3009 - protein, 112 aa, Artificial Sequence
  Description of Artificial Sequence: Synthetic polypeptide
DIVMTQSPLSLPVTPGEPASISCRSSQSLLHSNGYNYLDWYLQKPGQSPQLLIYLGSNRASGVPDRFSGSGSGTDFTLKISRVEAEDVGVYYCMQGSHWPPSFGQGTRLEIK

SEQ ID NO: 3010 - protein, 9 aa, Artificial Sequence
  Description of Artificial Sequence: Synthetic peptide
GTFSNYGIS

SEQ ID NO: 3011 - protein, 9 aa, Artificial Sequence
  Description of Artificial Sequence: Synthetic peptide
FTFSSYAMH

SEQ ID NO: 3012 - protein, 9 aa, Artificial Sequence
  Description of Artificial Sequence: Synthetic peptide
YTFSNYYIH

SEQ ID NO: 3013 - protein, 9 aa, Artificial Sequence
  Description of Artificial Sequence: Synthetic peptide
YTFTTDGIS

SEQ ID NO: 3014 - protein, 9 aa, Artificial Sequence
  Description of Artificial Sequence: Synthetic peptide
YTFTSYDIN

SEQ ID NO: 3015 - protein, 9 aa, Artificial Sequence
  Description of Artificial Sequence: Synthetic peptide
FTFSSSWMH

SEQ ID NO: 3016 - protein, 9 aa, Artificial Sequence
  Description of Artificial Sequence: Synthetic peptide
DTFNTYALS

SEQ ID NO: 3017 - protein, 12 aa, Artificial Sequence
  Description of Artificial Sequence: Synthetic peptide
GIINPGGSTSYA

SEQ ID NO: 3018 - protein, 13 aa, Artificial Sequence
  Description of Artificial Sequence: Synthetic peptide
SGISGSGGSTYYA

SEQ ID NO: 3019 - protein, 13 aa, Artificial Sequence
  Description of Artificial Sequence: Synthetic peptide
GWLNPNSGNTGYA

SEQ ID NO: 3020 - protein, 13 aa, Artificial Sequence
  Description of Artificial Sequence: Synthetic peptide
GRIYPHSGYTEYA

SEQ ID NO: 3021 - protein, 13 aa, Artificial Sequence
  Description of Artificial Sequence: Synthetic peptide
GWISPNNGDTNYA

SEQ ID NO: 3022 - protein, 13 aa, Artificial Sequence
  Description of Artificial Sequence: Synthetic peptide
GRIIPMLNIANYA

SEQ ID NO: 3023 - protein, 13 aa, Artificial Sequence
  Description of Artificial Sequence: Synthetic peptide
SFISTSSGYIYYA

SEQ ID NO: 3024 - protein, 13 aa, Artificial Sequence
  Description of Artificial Sequence: Synthetic peptide
GWMNPNSGNAGYA

SEQ ID NO: 3025 - protein, 18 aa, Artificial Sequence
  Description of Artificial Sequence: Synthetic peptide
CARDGYDFWSGYTSDDYW

SEQ ID NO: 3026 - protein, 9 aa, Artificial Sequence
  Description of Artificial Sequence: Synthetic peptide
CASDYGDYR

SEQ ID NO: 3027 - protein, 20 aa, Artificial Sequence
  Description of Artificial Sequence: Synthetic peptide
CARDLMTTVVTPGDYGMDVW

SEQ ID NO: 3028 - protein, 14 aa, Artificial Sequence
  Description of Artificial Sequence: Synthetic peptide
CARQDGGAFAFDIW

SEQ ID NO: 3029 - protein, 14 aa, Artificial Sequence [sequence omitted]

SEQ ID NO: 3030 - protein, 19 aa, Artificial Sequence
  Description of Artificial Sequence: Synthetic peptide
CARALIFGVPLLPYGMDVW

SEQ ID NO: 3031 - protein, 20 aa, Artificial Sequence
  Description of Artificial Sequence: Synthetic peptide
CAKDLATVGEPYYYYGMDVW

SEQ ID NO: 3032 - protein, 20 aa, Artificial Sequence
  Description of Artificial Sequence: Synthetic peptide
CARLWFGELHYYYYYGMDVW

SEQ ID NO: 3033 - protein, 12 aa, Artificial Sequence
  Description of Artificial Sequence: Synthetic peptide
RASQSVSSSNLA

SEQ ID NO: 3034 - protein, 11 aa, Artificial Sequence
  Description of Artificial Sequence: Synthetic peptide
RASQDIRNDLG

SEQ ID NO: 3035 - protein, 17 aa, Artificial Sequence
  Description of Artificial Sequence: Synthetic peptide
KSSQSVFYSSNNKNQLA

SEQ ID NO: 3036 - protein, 11 aa, Artificial Sequence
  Description of Artificial Sequence: Synthetic peptide
QASQDIFKYLN

SEQ ID NO: 3037 - protein, 16 aa, Artificial Sequence
  Description of Artificial Sequence: Synthetic peptide
SSSQSLLHSNGYNYLD

SEQ ID NO: 3038 - protein, 16 aa, Artificial Sequence
  Description of Artificial Sequence: Synthetic peptide
RSSQSLLHSNGYNYLD

SEQ ID NO: 3039 - protein, 7 aa, Artificial Sequence
  Description of Artificial Sequence: Synthetic peptide
WASTRES

SEQ ID NO: 3040 - protein, 7 aa, Artificial Sequence
  Description of Artificial Sequence: Synthetic peptide
YASSLQS

SEQ ID NO: 3041 - protein, 7 aa, Artificial Sequence
  Description of Artificial Sequence: Synthetic peptide
LGSNRAS

SEQ ID NO: 3042 - protein, 7 aa, Artificial Sequence
  Description of Artificial Sequence: Synthetic peptide
SASNLRS

SEQ ID NO: 3043 - protein, 10 aa, Artificial Sequence
  Description of Artificial Sequence: Synthetic peptide
CHHYGRSHTF

SEQ ID NO: 3044 - protein, 11 aa, Artificial Sequence
  Description of Artificial Sequence: Synthetic peptide
CQQANAFPPTF

SEQ ID NO: 3045 - protein, 11 aa, Artificial Sequence [sequence omitted]

SEQ ID NO: 3046 - protein, 11 aa, Artificial Sequence
  Description of Artificial Sequence: Synthetic peptide
CQQSYSTPPTF

SEQ ID NO: 3047 - protein, 11 aa, Artificial Sequence [sequence omitted]

SEQ ID NO: 3048 - protein, 11 aa, Artificial Sequence [sequence omitted]

SEQ ID NO: 3049 - protein, 11 aa, Artificial Sequence [sequence omitted]

SEQ ID NO: 3050 - protein, 11 aa, Artificial Sequence
  Description of Artificial Sequence: Synthetic peptide
CMQGSHWPPSF

SEQ ID NO: 3051 - protein, 9 aa, Artificial Sequence
  Description of Artificial Sequence: Synthetic peptide
EVDPIGHLY

SEQ ID NO: 3052 - protein, 14 aa, Artificial Sequence
  Description of Artificial Sequence: Synthetic peptide
CAMGFSSNDYKLSF

SEQ ID NO: 3053 - protein, 14 aa, Artificial Sequence
  Description of Artificial Sequence: Synthetic peptide
CALLRTSGTYKYIF

SEQ ID NO: 3054 - protein, 14 aa, Artificial Sequence
  Description of Artificial Sequence: Synthetic peptide
CAVTGSGGYNKLIF

SEQ ID NO: 3055 - protein, 15 aa, Artificial Sequence
  Description of Artificial Sequence: Synthetic peptide
CAVRVSLGGYNKLIF

SEQ ID NO: 3056 - protein, 16 aa, Artificial Sequence
  Description of Artificial Sequence: Synthetic peptide
CVVNMRDKAAGNKLTF

SEQ ID NO: 3057 - protein, 13 aa, Artificial Sequence
  Description of Artificial Sequence: Synthetic peptide
CLVGREYGNKLVF

SEQ ID NO: 3058 - protein, 12 aa, Artificial Sequence
  Description of Artificial Sequence: Synthetic peptide
CAGRGGSYIPTF

SEQ ID NO: 3059 - protein, 13 aa, Artificial Sequence
  Description of Artificial Sequence: Synthetic peptide
CVVNREGYSTLTF

SEQ ID NO: 3060 - protein, 12 aa, Artificial Sequence
  Description of Artificial Sequence: Synthetic peptide
CAVRGNNARLMF

SEQ ID NO: 3061 - protein, 12 aa, Artificial Sequence
  Description of Artificial Sequence: Synthetic peptide
CAVTDSNYQLIW

SEQ ID NO: 3062 - protein, 14 aa, Artificial Sequence
  Description of Artificial Sequence: Synthetic peptide
CGALTTSGTYKYIF

SEQ ID NO: 3063 - protein, 14 aa, Artificial Sequence
  Description of Artificial Sequence: Synthetic peptide
CAASVGSGNTPLVF

SEQ ID NO: 3064 - protein, 11 aa, Artificial Sequence
  Description of Artificial Sequence: Synthetic peptide
CAAKGAQKLVF

SEQ ID NO: 3065 - protein, 15 aa, Artificial Sequence
  Description of Artificial Sequence: Synthetic peptide
CAVPNYGGSQGNLIF

SEQ ID NO: 3066 - protein, 14 aa, Artificial Sequence
  Description of Artificial Sequence: Synthetic peptide
CAVLGASGTYKYIF

SEQ ID NO: 3067 - protein, 13 aa, Artificial Sequence
  Description of Artificial Sequence: Synthetic peptide
CAASSGTGNQFYF

SEQ ID NO: 3068 - protein, 14 aa, Artificial Sequence
  Description of Artificial Sequence: Synthetic peptide
CAVIPTSGTYKYIF

SEQ ID NO: 3069 - protein, 13 aa, Artificial Sequence
  Description of Artificial Sequence: Synthetic peptide
CAAMNSGYSTLTF

SEQ ID NO: 3070 - protein, 13 aa, Artificial Sequence
  Description of Artificial Sequence: Synthetic peptide
CILNVYTGNQFYF

SEQ ID NO: 3071 - protein, 9 aa, Artificial Sequence
  Description of Artificial Sequence: Synthetic peptide
CATDAGLIF

SEQ ID NO: 3072 - protein, 14 aa, Artificial Sequence
  Description of Artificial Sequence: Synthetic peptide
CAATSPNYGQNFVF

SEQ ID NO: 3073 - protein, 15 aa, Artificial Sequence
  Description of Artificial Sequence: Synthetic peptide
CAALTFSGGYNKLIF

SEQ ID NO: 3074 - protein, 12 aa, Artificial Sequence
  Description of Artificial Sequence: Synthetic peptide
CAASIPGNQFYF

SEQ ID NO: 3075 - protein, 15 aa, Artificial Sequence
  Description of Artificial Sequence: Synthetic peptide
CVVNKLTGGGNKLTF

SEQ ID NO: 3076 - protein, 13 aa, Artificial Sequence
  Description of Artificial Sequence: Synthetic peptide
CAASGGAGNMLTF

SEQ ID NO: 3077 - protein, 11 aa, Artificial Sequence
  Description of Artificial Sequence: Synthetic peptide
CAVEYGNKLVF

SEQ ID NO: 3078 - protein, 13 aa, Artificial Sequence
  Description of Artificial Sequence: Synthetic peptide
CAVDLNSGYALNF

SEQ ID NO: 3079 - protein, 15 aa, Artificial Sequence
  Description of Artificial Sequence: Synthetic peptide
CATDAYGGSNYKLTF

SEQ ID NO: 3080 - protein, 16 aa, Artificial Sequence
  Description of Artificial Sequence: Synthetic peptide
CIGGALYGGSQGNLIF

SEQ ID NO: 3081 - protein, 14 aa, Artificial Sequence
  Description of Artificial Sequence: Synthetic peptide
CAVSLKTSYDKVIF

SEQ ID NO: 3082 - protein, 15 aa, Artificial Sequence
  Description of Artificial Sequence: Synthetic peptide
CALSILTGGGNKLTF

SEQ ID NO: 3083 - protein, 15 aa, Artificial Sequence
  Description of Artificial Sequence: Synthetic peptide
CAVSDYGGSQGNLIF

SEQ ID NO: 3084 - protein, 14 aa, Artificial Sequence
  Description of Artificial Sequence: Synthetic peptide
CVVNTEEYGNKLVF

SEQ ID NO: 3085 - protein, 13 aa, Artificial Sequence
  Description of Artificial Sequence: Synthetic peptide
CAASGESQGNLIF

SEQ ID NO: 3086 - protein, 13 aa, Artificial Sequence
  Description of Artificial Sequence: Synthetic peptide
CAEISSNDYKLSF

SEQ ID NO: 3087 - protein, 13 aa, Artificial Sequence
  Description of Artificial Sequence: Synthetic peptide
CVVSGAGGFKTIF

SEQ ID NO: 3088 - protein, 15 aa, Artificial Sequence
  Description of Artificial Sequence: Synthetic peptide
CALSEANTNAGKSTF

SEQ ID NO: 3089 - protein, 12 aa, Artificial Sequence
  Description of Artificial Sequence: Synthetic peptide
CALRSNDYKLSF

SEQ ID NO: 3090 - protein, 13 aa, Artificial Sequence
  Description of Artificial Sequence: Synthetic peptide
CGTEETSGSRLTF

SEQ ID NO: 3091 - protein, 8 aa, Artificial Sequence
  Description of Artificial Sequence: Synthetic peptide
CAVNGMRF

SEQ ID NO: 3092 - protein, 12 aa, Artificial Sequence
  Description of Artificial Sequence: Synthetic peptide
CAALTGGFKTIF

SEQ ID NO: 3093 - protein, 12 aa, Artificial Sequence
  Description of Artificial Sequence: Synthetic peptide
CVVNRGNTPLVF

SEQ ID NO: 3094 - protein, 11 aa, Artificial Sequence
  Description of Artificial Sequence: Synthetic peptide
CAVRPGNDMRF

SEQ ID NO: 3095 - protein, 13 aa, Artificial Sequence
  Description of Artificial Sequence: Synthetic peptide
CILSRGATNKLIF

SEQ ID NO: 3096 - protein, 13 aa, Artificial Sequence
  Description of Artificial Sequence: Synthetic peptide
CALSEAIGTALIF

SEQ ID NO: 3097 - protein, 12 aa, Artificial Sequence
  Description of Artificial Sequence: Synthetic peptide
CAVTGGYQKVTF

SEQ ID NO: 3098 - protein, 11 aa, Artificial Sequence
  Description of Artificial Sequence: Synthetic peptide
CAGGGAQKLVF

SEQ ID NO: 3099 - protein, 15 aa, Artificial Sequence
  Description of Artificial Sequence: Synthetic peptide
CALSGSGGSNYKLTF

SEQ ID NO: 3100 - protein, 14 aa, Artificial Sequence
  Description of Artificial Sequence: Synthetic peptide
CAASIETGANNLFF

SEQ ID NO: 3101 - protein, 16 aa, Artificial Sequence
  Description of Artificial Sequence: Synthetic peptide
CAVLTLYGGATNKLIF

SEQ ID NO: 3102 - protein, 15 aa, Artificial Sequence
  Description of Artificial Sequence: Synthetic peptide
CAVPPYSGGYQKVTF

SEQ ID NO: 3103 - protein, 14 aa, Artificial Sequence
  Description of Artificial Sequence: Synthetic peptide
CAPLFTGTASKLTF

SEQ ID NO: 3104 - protein, 16 aa, Artificial Sequence
  Description of Artificial Sequence: Synthetic peptide
CAASDPGYSSASKIIF

SEQ ID NO: 3105 - protein, 13 aa, Artificial Sequence
  Description of Artificial Sequence: Synthetic peptide
CATDGNAGNMLTF

SEQ ID NO: 3106 - protein, 13 aa, Artificial Sequence
  Description of Artificial Sequence: Synthetic peptide
CIRQMDSSYKLIF

SEQ ID NO: 3107 - protein, 10 aa, Artificial Sequence
  Description of Artificial Sequence: Synthetic peptide
CAASDGQLTF

SEQ ID NO: 3108 - protein, 13 aa, Artificial Sequence
  Description of Artificial Sequence: Synthetic peptide
CAVIQFKDYKLSF

SEQ ID NO: 3109 - protein, 14 aa, Artificial Sequence
  Description of Artificial Sequence: Synthetic peptide
CAMSRYSSASKIIF

SEQ ID NO: 3110 - protein, 14 aa, Artificial Sequence
  Description of Artificial Sequence: Synthetic peptide
CAGDSWDSNYQLIW

SEQ ID NO: 3111 - protein, 16 aa, Artificial Sequence
  Description of Artificial Sequence: Synthetic peptide
CAAPRFLTGSARQLTF

SEQ ID NO: 3112 - protein, 13 aa, Artificial Sequence
  Description of Artificial Sequence: Synthetic peptide
CIVRFYNTDKLIF

SEQ ID NO: 3113 - protein, 15 aa, Artificial Sequence
  Description of Artificial Sequence: Synthetic peptide
CVALGFSGGYNKLIF

SEQ ID NO: 3114 - protein, 12 aa, Artificial Sequence
  Description of Artificial Sequence: Synthetic peptide
CAPYNQGGKLIF

SEQ ID NO: 3115 - protein, 14 aa, Artificial Sequence
  Description of Artificial Sequence: Synthetic peptide
CALTRGGGADGLTF

SEQ ID NO: 3116 - protein, 14 aa, Artificial Sequence
  Description of Artificial Sequence: Synthetic peptide
CAAVTYSSASKIIF

SEQ ID NO: 3117 - protein, 12 aa, Artificial Sequence
  Description of Artificial Sequence: Synthetic peptide
CAVQAGDYKLSF

SEQ ID NO: 3118 - protein, 15 aa, Artificial Sequence
  Description of Artificial Sequence: Synthetic peptide
CAVSRYGGSQGNLIF

SEQ ID NO: 3119 - protein, 12 aa, Artificial Sequence
  Description of Artificial Sequence: Synthetic peptide
CAVRDGGARLMF

SEQ ID NO: 3120 - protein, 15 aa, Artificial Sequence
  Description of Artificial Sequence: Synthetic peptide
CVVNGESGGYQKVTF

SEQ ID NO: 3121 - protein, 15 aa, Artificial Sequence
  Description of Artificial Sequence: Synthetic peptide
CVVISFSGGYNKLIF

SEQ ID NO: 3122 - protein, 11 aa, Artificial Sequence
  Description of Artificial Sequence: Synthetic peptide
CAVRDIGITIF

SEQ ID NO: 3123 - protein, 15 aa, Artificial Sequence
  Description of Artificial Sequence: Synthetic peptide
CIVRNYGGSQGNLIF

SEQ ID NO: 3124 - protein, 14 aa, Artificial Sequence
  Description of Artificial Sequence: Synthetic peptide
CAVRPMEYGNKLVF

SEQ ID NO: 3125 - protein, 12 aa, Artificial Sequence
  Description of Artificial Sequence: Synthetic peptide
CAENALGNKLVF

SEQ ID NO: 3126 - protein, 15 aa, Artificial Sequence
  Description of Artificial Sequence: Synthetic peptide
CAAPYSGAGSYQLTF

SEQ ID NO: 3127 - protein, 12 aa, Artificial Sequence
  Description of Artificial Sequence: Synthetic peptide
CAESAAGNKLTF

SEQ ID NO: 3128 - protein, 14 aa, Artificial Sequence
  Description of Artificial Sequence: Synthetic peptide
CASITQGGSEKLVF

SEQ ID NO: 3129 - protein, 15 aa, Artificial Sequence
  Description of Artificial Sequence: Synthetic peptide
CATDHYGGATNKLIF

SEQ ID NO: 3130 - protein, 11 aa, Artificial Sequence
  Description of Artificial Sequence: Synthetic peptide
CAVRIGNMLTF

SEQ ID NO: 3131 - protein, 15 aa, Artificial Sequence
  Description of Artificial Sequence: Synthetic peptide
CVVIDPNTGGFKTIF

SEQ ID NO: 3132 - protein, 15 aa, Artificial Sequence
  Description of Artificial Sequence: Synthetic peptide
CALSEGGGATNKLIF

SEQ ID NO: 3133 - protein, 12 aa, Artificial Sequence
  Description of Artificial Sequence: Synthetic peptide
CAVGGGSYIPTF

SEQ ID NO: 3134 - protein, 12 aa, Artificial Sequence
  Description of Artificial Sequence: Synthetic peptide
CAEKGNTGKLIF

SEQ ID NO: 3135 - protein, 17 aa, Artificial Sequence
  Description of Artificial Sequence: Synthetic peptide
CALSEAGAYNQGGKLIF

SEQ ID NO: 3136 - protein, 13 aa, Artificial Sequence
  Description of Artificial Sequence: Synthetic peptide
CAVGGQAGTALIF

SEQ ID NO: 3137 - protein, 14 aa, Artificial Sequence
  Description of Artificial Sequence: Synthetic peptide
CAVTASTGGFKTIF

SEQ ID NO: 3138 - protein, 12 aa, Artificial Sequence
  Description of Artificial Sequence: Synthetic peptide
CAVSDSSYKLIF

SEQ ID NO: 3139 - protein, 10 aa, Artificial Sequence
  Description of Artificial Sequence: Synthetic peptide
CAPNNARLMF

SEQ ID NO: 3140 - protein, 11 aa, Artificial Sequence
  Description of Artificial Sequence: Synthetic peptide
CAANSGYALNF

SEQ ID NO: 3141 - protein, 16 aa, Artificial Sequence
  Description of Artificial Sequence: Synthetic peptide
CAGPGYSGAGSYQLTF

SEQ ID NO: 3142 - protein, 12 aa, Artificial Sequence
  Description of Artificial Sequence: Synthetic peptide
CAVVDSNYQLIW

SEQ ID NO: 3143 - protein, 11 aa, Artificial Sequence
  Description of Artificial Sequence: Synthetic peptide
CAVFGGNQFYF

SEQ ID NO: 3144 - protein, 13 aa, Artificial Sequence
  Description of Artificial Sequence: Synthetic peptide
CAVLPYNTDKLIF

SEQ ID NO: 3145 - protein, 13 aa, Artificial Sequence
  Description of Artificial Sequence: Synthetic peptide
CAPASGGSYIPTF

SEQ ID NO: 3146 - protein, 11 aa, Artificial Sequence
  Description of Artificial Sequence: Synthetic peptide
CAVQAGTALIF

SEQ ID NO: 3147 - protein, 12 aa, Artificial Sequence
  Description of Artificial Sequence: Synthetic peptide
CAVLDNNNDMRF

SEQ ID NO: 3148 - protein, 12 aa, Artificial Sequence
  Description of Artificial Sequence: Synthetic peptide
CAVRSRDDKIIF

SEQ ID NO: 3149 - protein, 12 aa, Artificial Sequence
  Description of Artificial Sequence: Synthetic peptide
CAVTTSRDRLMF

SEQ ID NO: 3150 - protein, 18 aa, Artificial Sequence
  Description of Artificial Sequence: Synthetic peptide
CIVSSRGGSGGGADGLTF

SEQ ID NO: 3151 - protein, 12 aa, Artificial Sequence
  Description of Artificial Sequence: Synthetic peptide
CAVRDRHNDMRF

SEQ ID NO: 3152 - protein, 11 aa, Artificial Sequence
  Description of Artificial Sequence: Synthetic peptide
CAATRSYQLTF

SEQ ID NO: 3153 - protein, 13 aa, Artificial Sequence
  Description of Artificial Sequence: Synthetic peptide
CILFTGTASKLTF

SEQ ID NO: 3154 - protein, 12 aa, Artificial Sequence
  Description of Artificial Sequence: Synthetic peptide
CAVLDNNARLMF

SEQ ID NO: 3155 - protein, 12 aa, Artificial Sequence
  Description of Artificial Sequence: Synthetic peptide
CAVQTGANNLFF

SEQ ID NO: 3156 - protein, 14 aa, Artificial Sequence
  Description of Artificial Sequence: Synthetic peptide
CAVVNYQAGTALIF

SEQ ID NO: 3157 - protein, 13 aa, Artificial Sequence
  Description of Artificial Sequence: Synthetic peptide
CAASAAGTYKYIF

SEQ ID NO: 3158 - protein, 14 aa, Artificial Sequence
  Description of Artificial Sequence: Synthetic peptide
CGTGYGGATNKLIF

SEQ ID NO: 3159 - protein, 15 aa, Artificial Sequence
  Description of Artificial Sequence: Synthetic peptide
CAYRSAVIYGQNFVF

SEQ ID NO: 3160 - protein, 13 aa, Artificial Sequence
  Description of Artificial Sequence: Synthetic peptide
CVVNPGGSYIPTF

SEQ ID NO: 3161 - protein, 15 aa, Artificial Sequence
  Description of Artificial Sequence: Synthetic peptide
CAYRSAGGGADGLTF

SEQ ID NO: 3162 - protein, 15 aa, Artificial Sequence
  Description of Artificial Sequence: Synthetic peptide
CAVLKPNQAGTALIF

SEQ ID NO: 3163 - protein, 12 aa, Artificial Sequence
  Description of Artificial Sequence: Synthetic peptide
CAVPMGNTPLVF

SEQ ID NO: 3164 - protein, 15 aa, Artificial Sequence
  Description of Artificial Sequence: Synthetic peptide
CAVRDLSGGSYIPTF

SEQ ID NO: 3165 - protein, 12 aa, Artificial Sequence
  Description of Artificial Sequence: Synthetic peptide
CAVRGGTYKYIF

SEQ ID NO: 3166 - protein, 12 aa, Artificial Sequence
  Description of Artificial Sequence: Synthetic peptide
CASQGGSEKLVF

SEQ ID NO: 3167 - protein, 13 aa, Artificial Sequence
  Description of Artificial Sequence: Synthetic peptide
CAGPTGGGNKLTF

SEQ ID NO: 3168 - protein, 13 aa, Artificial Sequence
  Description of Artificial Sequence: Synthetic peptide
CAVLGSNDYKLSF

SEQ ID NO: 3169 - protein, 16 aa, Artificial Sequence
  Description of Artificial Sequence: Synthetic peptide
CAAMAYSGAGSYQLTF

SEQ ID NO: 3170 - protein, 14 aa, Artificial Sequence
  Description of Artificial Sequence: Synthetic peptide
CAVRANQAGTALIF

SEQ ID NO: 3171 - protein, 13 aa, Artificial Sequence
  Description of Artificial Sequence: Synthetic peptide
CAGRDNYGQNFVF

SEQ ID NO: 3172 - protein, 14 aa, Artificial Sequence
  Description of Artificial Sequence: Synthetic peptide
CAYRSGYNNNDMRF

SEQ ID NO: 3173 - protein, 14 aa, Artificial Sequence
  Description of Artificial Sequence: Synthetic peptide
CAESGSGATNKLIF

SEQ ID NO: 3174 - protein, 13 aa, Artificial Sequence
  Description of Artificial Sequence: Synthetic peptide
CAAGGYNFNKFYF

SEQ ID NO: 3175 - protein, 15 aa, Artificial Sequence
  Description of Artificial Sequence: Synthetic peptide
CAVPDRGGGADGLTF

SEQ ID NO: 3176 - protein, 12 aa, Artificial Sequence
  Description of Artificial Sequence: Synthetic peptide
CAVRDNNARLMF

SEQ ID NO: 3177 - protein, 18 aa, Artificial Sequence
  Description of Artificial Sequence: Synthetic peptide
CAFPSVRGGGTSYGKLTF

SEQ ID NO: 3178 - protein, 17 aa, Artificial Sequence
  Description of Artificial Sequence: Synthetic peptide
CAVKPGAGGTSYGKLTF

SEQ ID NO: 3179 - protein, 13 aa, Artificial Sequence
  Description of Artificial Sequence: Synthetic peptide
CAVNTGTASKLTF

SEQ ID NO: 3180 - protein, 13 aa, Artificial Sequence
  Description of Artificial Sequence: Synthetic peptide
CAVRERGNTPLVF

SEQ ID NO: 3181 - protein, 16 aa, Artificial Sequence
  Description of Artificial Sequence: Synthetic peptide
CAAKGVGGTSYGKLTF

SEQ ID NO: 3182 - protein, 14 aa, Artificial Sequence
  Description of Artificial Sequence: Synthetic peptide
CVVPASGGSYIPTF

SEQ ID NO: 3183 - protein, 17 aa, Artificial Sequence
  Description of Artificial Sequence: Synthetic peptide
CALSEAANSGGYQKVTF

SEQ ID NO: 3184 - protein, 7 aa, Artificial Sequence
  Description of Artificial Sequence: Synthetic peptide
CGIDMRF

SEQ ID NO: 3185 - protein, 12 aa, Artificial Sequence
  Description of Artificial Sequence: Synthetic peptide
CAMSANDYKLSF

SEQ ID NO: 3186 - protein, 16 aa, Artificial Sequence
  Description of Artificial Sequence: Synthetic peptide
CAVLNAGGTSYGKLTF

SEQ ID NO: 3187 - protein, 16 aa, Artificial Sequence
  Description of Artificial Sequence: Synthetic peptide
CAVNSEIYNQGGKLIF

SEQ ID NO: 3188 - protein, 11 aa, Artificial Sequence
  Description of Artificial Sequence: Synthetic peptide
CALIRDDKIIF

SEQ ID NO: 3189 - protein, 12 aa, Artificial Sequence
  Description of Artificial Sequence: Synthetic peptide
CAVNNGNNDMRF

SEQ ID NO: 3190 - protein, 15 aa, Artificial Sequence
  Description of Artificial Sequence: Synthetic peptide
CAFDALTGGGNKLTF

SEQ ID NO: 3191 - protein, 13 aa, Artificial Sequence
  Description of Artificial Sequence: Synthetic peptide
CAELNTGGFKTIF

SEQ ID NO: 3192 - protein, 13 aa, Artificial Sequence
  Description of Artificial Sequence: Synthetic peptide
CAVFTSGTYKYIF

SEQ ID NO: 3193 - protein, 12 aa, Artificial Sequence
  Description of Artificial Sequence: Synthetic peptide
CAAKGGADGLTF

SEQ ID NO: 3194 - protein, 15 aa, Artificial Sequence
  Description of Artificial Sequence: Synthetic peptide
CVVNDRGNYGQNFVF

SEQ ID NO: 3195 - protein, 16 aa, Artificial Sequence
  Description of Artificial Sequence: Synthetic peptide
CILLPYSGGGADGLTF

SEQ ID NO: 3196 - protein, 14 aa, Artificial Sequence
  Description of Artificial Sequence: Synthetic peptide
CAVPIYNQGGKLIF

SEQ ID NO: 3197 - protein, 17 aa, Artificial Sequence
  Description of Artificial Sequence: Synthetic peptide
CALSEAYYGGSQGNLIF

SEQ ID NO: 3198 - protein, 17 aa, Artificial Sequence
  Description of Artificial Sequence: Synthetic peptide
CATVSFAGGTSYGKLTF

SEQ ID NO: 3199 - protein, 13 aa, Artificial Sequence
  Description of Artificial Sequence: Synthetic peptide
CVVNRDAGNMLTF

SEQ ID NO: 3200 - protein, 13 aa, Artificial Sequence
  Description of Artificial Sequence: Synthetic peptide
CAVRAGGRRALTF

SEQ ID NO: 3201 - protein, 14 aa, Artificial Sequence
  Description of Artificial Sequence: Synthetic peptide
CAATDSGGYQKVTF

SEQ ID NO: 3202 - protein, 15 aa, Artificial Sequence
  Description of Artificial Sequence: Synthetic peptide
CAVRDYWAGSYQLTF

SEQ ID NO: 3203 - protein, 12 aa, Artificial Sequence
  Description of Artificial Sequence: Synthetic peptide
CAASASSDKLIF

SEQ ID NO: 3204 - protein, 15 aa, Artificial Sequence
  Description of Artificial Sequence: Synthetic peptide
CVVPGRGYNFNKFYF

SEQ ID NO: 3205 - protein, 14 aa, Artificial Sequence
  Description of Artificial Sequence: Synthetic peptide
CALSDKQGNTPLVF

SEQ ID NO: 3206 - protein, 16 aa, Artificial Sequence
  Description of Artificial Sequence: Synthetic peptide
CAGAGQWSSGTYKYIF

SEQ ID NO: 3207 - protein, 12 aa, Artificial Sequence
  Description of Artificial Sequence: Synthetic peptide
CAVVNNNARLMF

SEQ ID NO: 3208 - protein, 15 aa, Artificial Sequence
  Description of Artificial Sequence: Synthetic peptide
CALSEEVNRDDKIIF

SEQ ID NO: 3209 - protein, 11 aa, Artificial Sequence
  Description of Artificial Sequence: Synthetic peptide
CAGNYGQNFVF

SEQ ID NO: 3210 - protein, 11 aa, Artificial Sequence
  Description of Artificial Sequence: Synthetic peptide
CAVQKHYQLIW

SEQ ID NO: 3211 - protein, 15 aa, Artificial Sequence
  Description of Artificial Sequence: Synthetic peptide
CIVRPLKTSYDKVIF

SEQ ID NO: 3212 - protein, 13 aa, Artificial Sequence
  Description of Artificial Sequence: Synthetic peptide
CLPVLYSGYALNF

SEQ ID NO: 3213 - protein, 13 aa, Artificial Sequence
  Description of Artificial Sequence: Synthetic peptide
CAVSRNNNARLMF

SEQ ID NO: 3214 - protein, 9 aa, Artificial Sequence
  Description of Artificial Sequence: Synthetic peptide
CAESGDMRF

SEQ ID NO: 3215 - protein, 16 aa, Artificial Sequence
  Description of Artificial Sequence: Synthetic peptide
CALSNAGGTSYGKLTF

SEQ ID NO: 3216 - protein, 14 aa, Artificial Sequence
  Description of Artificial Sequence: Synthetic peptide
CAVRVDSGYSTLTF

SEQ ID NO: 3217 - protein, 12 aa, Artificial Sequence
  Description of Artificial Sequence: Synthetic peptide
CAVRDSNYQLIW

SEQ ID NO: 3218 - protein, 12 aa, Artificial Sequence
  Description of Artificial Sequence: Synthetic peptide
CAVANAGNMLTF

SEQ ID NO: 3219 - protein, 10 aa, Artificial Sequence
  Description of Artificial Sequence: Synthetic peptide
CAVNDYKLSF

SEQ ID NO: 3220 - protein, 13 aa, Artificial Sequence
  Description of Artificial Sequence: Synthetic peptide
CAASEGGNEKLTF

SEQ ID NO: 3221 - protein, 14 aa, Artificial Sequence
  Description of Artificial Sequence: Synthetic peptide
CAASIGGSARQLTF

SEQ ID NO: 3222 - protein, 11 aa, Artificial Sequence
  Description of Artificial Sequence: Synthetic peptide
CAMNTGNQFYF

SEQ ID NO: 3223 - protein, 14 aa, Artificial Sequence
  Description of Artificial Sequence: Synthetic peptide
CAVLWAQEGGKLIF

SEQ ID NO: 3224 - protein, 13 aa, Artificial Sequence
  Description of Artificial Sequence: Synthetic peptide
CAVTYTGGFKTIF

SEQ ID NO: 3225 - protein, 12 aa, Artificial Sequence
  Description of Artificial Sequence: Synthetic peptide
CAVIDSNYQLIW

SEQ ID NO: 3226 - protein, 15 aa, Artificial Sequence
  Description of Artificial Sequence: Synthetic peptide
CALSARRAGSYQLTF

SEQ ID NO: 3227 - protein, 13 aa, Artificial Sequence
  Description of Artificial Sequence: Synthetic peptide
CVVRNTGFQKLVF

SEQ ID NO: 3228 - protein, 13 aa, Artificial Sequence
  Description of Artificial Sequence: Synthetic peptide
CAATNFGNEKLTF

SEQ ID NO: 3229 - protein, 13 aa, Artificial Sequence
  Description of Artificial Sequence: Synthetic peptide
CASPSGGYNKLIF

SEQ ID NO: 3230 - protein, 12 aa, Artificial Sequence
  Description of Artificial Sequence: Synthetic peptide
CAVMNNNARLMF

SEQ ID NO: 3231 - protein, 13 aa, Artificial Sequence
  Description of Artificial Sequence: Synthetic peptide
CAVPSGGSYIPTF

SEQ ID NO: 3232 - protein, 12 aa, Artificial Sequence
  Description of Artificial Sequence: Synthetic peptide
CAVFSGNTPLVF

SEQ ID NO: 3233 - protein, 12 aa, Artificial Sequence
  Description of Artificial Sequence: Synthetic peptide
CAAPNSGYALNF

SEQ ID NO: 3234 - protein, 13 aa, Artificial Sequence
  Description of Artificial Sequence: Synthetic peptide
CATDYNAGNMLTF

SEQ ID NO: 3235 - protein, 13 aa, Artificial Sequence
  Description of Artificial Sequence: Synthetic peptide
CAENSGGYQKVTF

SEQ ID NO: 3236 - protein, 13 aa, Artificial Sequence
  Description of Artificial Sequence: Synthetic peptide
CATAQGGSEKLVF

SEQ ID NO: 3237 - protein, 13 aa, Artificial Sequence
  Description of Artificial Sequence: Synthetic peptide
CAEKPGTASKLTF

SEQ ID NO: 3238 - protein, 15 aa, Artificial Sequence
  Description of Artificial Sequence: Synthetic peptide
CAVRDTGGAGNMLTF

SEQ ID NO: 3239 - protein, 15 aa, Artificial Sequence
  Description of Artificial Sequence: Synthetic peptide
CAALDGTGGYNKLIF

SEQ ID NO: 3240 - protein, 15 aa, Artificial Sequence
  Description of Artificial Sequence: Synthetic peptide
CAYRAPTSGTYKYIF

SEQ ID NO: 3241 - protein, 13 aa, Artificial Sequence
  Description of Artificial Sequence: Synthetic peptide
CAVVWDSGYALNF

SEQ ID NO: 3242 - protein, 15 aa, Artificial Sequence
  Description of Artificial Sequence: Synthetic peptide
CAEFRFSGGYNKLIF

SEQ ID NO: 3243 - protein, 11 aa, Artificial Sequence
  Description of Artificial Sequence: Synthetic peptide
CAFCTGNQFYF

SEQ ID NO: 3244 - protein, 13 aa, Artificial Sequence
  Description of Artificial Sequence: Synthetic peptide
CLHSGGGADGLTF

SEQ ID NO: 3245 - protein, 16 aa, Artificial Sequence
  Description of Artificial Sequence: Synthetic peptide
CAARDISNFGNEKLTF

SEQ ID NO: 3246 - protein, 13 aa, Artificial Sequence
  Description of Artificial Sequence: Synthetic peptide
CIPATGTASKLTF

SEQ ID NO: 3247 - protein, 11 aa, Artificial Sequence
  Description of Artificial Sequence: Synthetic peptide
CAVREAGKSTF

SEQ ID NO: 3248 - protein, 12 aa, Artificial Sequence
  Description of Artificial Sequence: Synthetic peptide
CIVRVAGNQFYF

SEQ ID NO: 3249 - protein, 14 aa, Artificial Sequence
  Description of Artificial Sequence: Synthetic peptide
CVVNTNTGRRALTF

SEQ ID NO: 3250 - protein, 10 aa, Artificial Sequence
  Description of Artificial Sequence: Synthetic peptide
CAVDDYKLSF

SEQ ID NO: 3251 - protein, 15 aa, Artificial Sequence
  Description of Artificial Sequence: Synthetic peptide
CAGLNYGGSQGNLIF

SEQ ID NO: 3252 - protein, 17 aa, Artificial Sequence
  Description of Artificial Sequence: Synthetic peptide
CAVRDPMNNNAGNMLTF

SEQ ID NO: 3253 - protein, 11 aa, Artificial Sequence
  Description of Artificial Sequence: Synthetic peptide
CARRNTDKLIF

SEQ ID NO: 3254 - protein, 10 aa, Artificial Sequence
  Description of Artificial Sequence: Synthetic peptide
CAANTDKLIF

SEQ ID NO: 3255 - protein, 11 aa, Artificial Sequence
  Description of Artificial Sequence: Synthetic peptide
CAVDPLGPLTF

SEQ ID NO: 3256 - protein, 13 aa, Artificial Sequence
  Description of Artificial Sequence: Synthetic peptide
CAVSPGGSYIPTF

SEQ ID NO: 3257 - protein, 11 aa, Artificial Sequence
  Description of Artificial Sequence: Synthetic peptide
CAVNRDDKIIF

SEQ ID NO: 3258 - protein, 15 aa, Artificial Sequence
  Description of Artificial Sequence: Synthetic peptide
CAVHDRGSTLGRLYF

SEQ ID NO: 3259 - protein, 11 aa, Artificial Sequence
  Description of Artificial Sequence: Synthetic peptide
CAMIGRGKLIF

SEQ ID NO: 3260 - protein, 13 aa, Artificial Sequence
  Description of Artificial Sequence: Synthetic peptide
CVVNGEYGNKLVF

SEQ ID NO: 3261 - protein, 11 aa, Artificial Sequence
  Description of Artificial Sequence: Synthetic peptide
CAVEVNARLMF

SEQ ID NO: 3262 - protein, 12 aa, Artificial Sequence
  Description of Artificial Sequence: Synthetic peptide
CAVRDRDARLMF

SEQ ID NO: 3263 - protein, 14 aa, Artificial Sequence
  Description of Artificial Sequence: Synthetic peptide
CAVRDRTGRRALTF

SEQ ID NO: 3264 - protein, 15 aa, Artificial Sequence
  Description of Artificial Sequence: Synthetic peptide
CALLDSGAGSYQLTF

SEQ ID NO: 3265 - protein, 12 aa, Artificial Sequence
  Description of Artificial Sequence: Synthetic peptide
CAAWASSYKLIF

SEQ ID NO: 3266 - protein, 17 aa, Artificial Sequence
  Description of Artificial Sequence: Synthetic peptide
CATGSNAGGTSYGKLTF

SEQ ID NO: 3267 - protein, 13 aa, Artificial Sequence
  Description of Artificial Sequence: Synthetic peptide
CAVGGYTGNQFYF

SEQ ID NO: 3268 - protein, 11 aa, Artificial Sequence
  Description of Artificial Sequence: Synthetic peptide
CAKTSGSRLTF

SEQ ID NO: 3269 - protein, 17 aa, Artificial Sequence
  Description of Artificial Sequence: Synthetic peptide
CALSGPDRGSTLGRLYF

SEQ ID NO: 3270 - protein, 13 aa, Artificial Sequence
  Description of Artificial Sequence: Synthetic peptide
CAVNMRGNEKLTF

SEQ ID NO: 3271 - protein, 14 aa, Artificial Sequence
  Description of Artificial Sequence: Synthetic peptide
CAASGGSNTGKLIF

SEQ ID NO: 3272 - protein, 13 aa, Artificial Sequence
  Description of Artificial Sequence: Synthetic peptide
CAVRGGGSYIPTF

SEQ ID NO: 3273 - protein, 14 aa, Artificial Sequence
  Description of Artificial Sequence: Synthetic peptide
CVVTTGGSQGNLIF

SEQ ID NO: 3274 - protein, 14 aa, Artificial Sequence
  Description of Artificial Sequence: Synthetic peptide
CAVINTGQGGKLIF

SEQ ID NO: 3275 - protein, 17 aa, Artificial Sequence
  Description of Artificial Sequence: Synthetic peptide
CAFMFAYSGAGSYQLTF

SEQ ID NO: 3276 - protein, 15 aa, Artificial Sequence
  Description of Artificial Sequence: Synthetic peptide
CAVRSYGGSQGNLIF

SEQ ID NO: 3277 - protein, 15 aa, Artificial Sequence
  Description of Artificial Sequence: Synthetic peptide
CLLGGSGGATNKLIF

SEQ ID NO: 3278 - protein, 16 aa, Artificial Sequence
  Description of Artificial Sequence: Synthetic peptide
CAEILPMDTGRRALTF

SEQ ID NO: 3279 - protein, 14 aa, Artificial Sequence
  Description of Artificial Sequence: Synthetic peptide
CVVNEYSGTYKYIF

SEQ ID NO: 3280 - protein, 14 aa, Artificial Sequence
  Description of Artificial Sequence: Synthetic peptide
CAENSGGSNYKLTF

SEQ ID NO: 3281 - protein, 17 aa, Artificial Sequence
  Description of Artificial Sequence: Synthetic peptide
CAVTAYISNFGNEKLTF

SEQ ID NO: 3282 - protein, 13 aa, Artificial Sequence
  Description of Artificial Sequence: Synthetic peptide
CATFKQAGTALIF

SEQ ID NO: 3283 - protein, 14 aa, Artificial Sequence
  Description of Artificial Sequence: Synthetic peptide
CAMSASNQGGKLIF

SEQ ID NO: 3284 - protein, 15 aa, Artificial Sequence
  Description of Artificial Sequence: Synthetic peptide
CAENSLNTGGFKTIF

SEQ ID NO: 3285 - protein, 15 aa, Artificial Sequence
  Description of Artificial Sequence: Synthetic peptide
CAVRGSGGGADGLTF

SEQ ID NO: 3286 - protein, 11 aa, Artificial Sequence
  Description of Artificial Sequence: Synthetic peptide
CAGTDNARLMF

SEQ ID NO: 3287 - protein, 16 aa, Artificial Sequence
  Description of Artificial Sequence: Synthetic peptide
CGAFRTGSSNTGKLIF

SEQ ID NO: 3288 - protein, 14 aa, Artificial Sequence
  Description of Artificial Sequence: Synthetic peptide
CAVRGNTGGFKTIF

SEQ ID NO: 3289 - protein, 13 aa, Artificial Sequence
  Description of Artificial Sequence: Synthetic peptide
CAVLQTGANNLFF

SEQ ID NO: 3290 - protein, 13 aa, Artificial Sequence
  Description of Artificial Sequence: Synthetic peptide
CVVNMGDTDKLIF

SEQ ID NO: 3291 - protein, 13 aa, Artificial Sequence
  Description of Artificial Sequence: Synthetic peptide
CVVNHGYGQNFVF

SEQ ID NO: 3292 - protein, 12 aa, Artificial Sequence
  Description of Artificial Sequence: Synthetic peptide
CAILTGANNLFF

SEQ ID NO: 3293 - protein, 10 aa, Artificial Sequence
  Description of Artificial Sequence: Synthetic peptide
CAATGNQFYF

SEQ ID NO: 3294 - protein, 15 aa, Artificial Sequence
  Description of Artificial Sequence: Synthetic peptide
CVVNHYSGGYQKVTF

SEQ ID NO: 3295 - protein, 12 aa, Artificial Sequence
  Description of Artificial Sequence: Synthetic peptide
CAFLYGNNRLAF

SEQ ID NO: 3296 - protein, 11 aa, Artificial Sequence
  Description of Artificial Sequence: Synthetic peptide
CAEKTGNQFYF

SEQ ID NO: 3297 - protein, 12 aa, Artificial Sequence
  Description of Artificial Sequence: Synthetic peptide
CVAYNAGNMLTF

SEQ ID NO: 3298 - protein, 15 aa, Artificial Sequence
  Description of Artificial Sequence: Synthetic peptide
CILRDFMNRDDKIIF

SEQ ID NO: 3299 - protein, 14 aa, Artificial Sequence
  Description of Artificial Sequence: Synthetic peptide
CAVQARGGADGLTF

SEQ ID NO: 3300 - protein, 11 aa, Artificial Sequence
  Description of Artificial Sequence: Synthetic peptide
CAVQWDARLMF

SEQ ID NO: 3301 - protein, 12 aa, Artificial Sequence
  Description of Artificial Sequence: Synthetic peptide
CAYRGYNEKLTF

SEQ ID NO: 3302 - protein, 13 aa, Artificial Sequence
  Description of Artificial Sequence: Synthetic peptide
CAGSNQAGTALIF

SEQ ID NO: 3303 - protein, 11 aa, Artificial Sequence
  Description of Artificial Sequence: Synthetic peptide
CAVYDGNQFYF

SEQ ID NO: 3304 - protein, 12 aa, Artificial Sequence
  Description of Artificial Sequence: Synthetic peptide
CAVRDSSYKLIF

SEQ ID NO: 3305 - protein, 13 aa, Artificial Sequence
  Description of Artificial Sequence: Synthetic peptide
CAPAIQGAQKLVF

SEQ ID NO: 3306 - protein, 14 aa, Artificial Sequence
  Description of Artificial Sequence: Synthetic peptide
CATDGGTSYGKLTF

SEQ ID NO: 3307 - protein, 15 aa, Artificial Sequence
  Description of Artificial Sequence: Synthetic peptide
CAVAYSGAGSYQLTF

SEQ ID NO: 3308 - protein, 13 aa, Artificial Sequence
  Description of Artificial Sequence: Synthetic peptide
CAVRKNNNARLMF

SEQ ID NO: 3309 - protein, 12 aa, Artificial Sequence
  Description of Artificial Sequence: Synthetic peptide
CAVRNSNYQLIW

SEQ ID NO: 3310 - protein, 13 aa, Artificial Sequence
  Description of Artificial Sequence: Synthetic peptide
CVVNAYNNNDMRF

SEQ ID NO: 3311 - protein, 11 aa, Artificial Sequence
  Description of Artificial Sequence: Synthetic peptide
CAVYPGYALNF

SEQ ID NO: 3312 - protein, 14 aa, Artificial Sequence
  Description of Artificial Sequence: Synthetic peptide
CALSRTSGTYKYIF

SEQ ID NO: 3313 - protein, 16 aa, Artificial Sequence
  Description of Artificial Sequence: Synthetic peptide
CAVISAGGTSYGKLTF

SEQ ID NO: 3314 - protein, 16 aa, Artificial Sequence
  Description of Artificial Sequence: Synthetic peptide
CIVRFLTQGGSEKLVF

SEQ ID NO: 3315 - protein, 12 aa, Artificial Sequence
  Description of Artificial Sequence: Synthetic peptide
CAVSDGTDKLIF

SEQ ID NO: 3316 - protein, 17 aa, Artificial Sequence
  Description of Artificial Sequence: Synthetic peptide
CALSEADYGGATNKLIF

SEQ ID NO: 3317 - protein, 12 aa, Artificial Sequence
  Description of Artificial Sequence: Synthetic peptide
CAVRGGSYIPTF

SEQ ID NO: 3318 - protein, 13 aa, Artificial Sequence
  Description of Artificial Sequence: Synthetic peptide
CAETDSGNTPLVF

SEQ ID NO: 3319 - protein, 15 aa, Artificial Sequence
  Description of Artificial Sequence: Synthetic peptide
CAMREGRNYGQNFVF

SEQ ID NO: 3320 - protein, 15 aa, Artificial Sequence
  Description of Artificial Sequence: Synthetic peptide
CAGQLISGTASKLTF

SEQ ID NO: 3321 - protein, 15 aa, Artificial Sequence
  Description of Artificial Sequence: Synthetic peptide
CAVRKTTDSWGKLQF

SEQ ID NO: 3322 - protein, 12 aa, Artificial Sequence
  Description of Artificial Sequence: Synthetic peptide
CAGPYNFNKFYF

SEQ ID NO: 3323 - protein, 12 aa, Artificial Sequence
  Description of Artificial Sequence: Synthetic peptide
CAVTGGANNLFF

SEQ ID NO: 3324 - protein, 16 aa, Artificial Sequence
  Description of Artificial Sequence: Synthetic peptide
CILRDAGGTSYGKLTF

SEQ ID NO: 3325 - protein, 15 aa, Artificial Sequence
  Description of Artificial Sequence: Synthetic peptide
CAVRGATSGTYKYIF

SEQ ID NO: 3326 - protein, 15 aa, Artificial Sequence
  Description of Artificial Sequence: Synthetic peptide
CAVVEYGGSQGNLIF

SEQ ID NO: 3327 - protein, 15 aa, Artificial Sequence
  Description of Artificial Sequence: Synthetic peptide
CVVTTGGGATNKLIF

SEQ ID NO: 3328 - protein, 15 aa, Artificial Sequence
  Description of Artificial Sequence: Synthetic peptide
CARSSTTDSWGKLQF

SEQ ID NO: 3329 - protein, 13 aa, Artificial Sequence
  Description of Artificial Sequence: Synthetic peptide
CVVNLHYGQNFVF

SEQ ID NO: 3330 - protein, 12 aa, Artificial Sequence
  Description of Artificial Sequence: Synthetic peptide
CAVTPGNARLMF

SEQ ID NO: 3331 - protein, 14 aa, Artificial Sequence
  Description of Artificial Sequence: Synthetic peptide
CAVDGMDSNYQLIW

SEQ ID NO: 3332 - protein, 16 aa, Artificial Sequence
  Description of Artificial Sequence: Synthetic peptide
CAVRGHNAGNNRKLIW

SEQ ID NO: 3333 - protein, 11 aa, Artificial Sequence
  Description of Artificial Sequence: Synthetic peptide
CVFDSNYQLIW

SEQ ID NO: 3334 - protein, 10 aa, Artificial Sequence
  Description of Artificial Sequence: Synthetic peptide
CVLNDYKLSF

SEQ ID NO: 3335 - protein, 13 aa, Artificial Sequence
  Description of Artificial Sequence: Synthetic peptide
CAAGSPNDYKLSF

SEQ ID NO: 3336 - protein, 10 aa, Artificial Sequence
  Description of Artificial Sequence: Synthetic peptide
CGGGADGLTF

SEQ ID NO: 3337 - protein, 17 aa, Artificial Sequence
  Description of Artificial Sequence: Synthetic peptide
CAVTSADRGSTLGRLYF

SEQ ID NO: 3338 - protein, 17 aa, Artificial Sequence
  Description of Artificial Sequence: Synthetic peptide
CILRGAYSGAGSYQLTF

SEQ ID NO: 3339 - protein, 13 aa, Artificial Sequence
  Description of Artificial Sequence: Synthetic peptide
CAEKREGTYKYIF

SEQ ID NO: 3340 - protein, 18 aa, Artificial Sequence
  Description of Artificial Sequence: Synthetic peptide
CAENKGRERKSSGDKLTF

SEQ ID NO: 3341 - protein, 12 aa, Artificial Sequence
  Description of Artificial Sequence: Synthetic peptide
CAVRDRDYKLSF

SEQ ID NO: 3342 - protein, 17 aa, Artificial Sequence
  Description of Artificial Sequence: Synthetic peptide
CAVRLHPASGGSYIPTF

SEQ ID NO: 3343 - protein, 16 aa, Artificial Sequence
  Description of Artificial Sequence: Synthetic peptide
CAGQYLRGGATNKLIF

SEQ ID NO: 3344 - protein, 15 aa, Artificial Sequence
  Description of Artificial Sequence: Synthetic peptide
CALLSLRGSNYKLTF

SEQ ID NO: 3345 - protein, 13 aa, Artificial Sequence
  Description of Artificial Sequence: Synthetic peptide
CVVNLANDYKLSF

SEQ ID NO: 3346 - protein, 12 aa, Artificial Sequence
  Description of Artificial Sequence: Synthetic peptide
CILRDGNNDMRF

SEQ ID NO: 3347 - protein, 12 aa, Artificial Sequence
  Description of Artificial Sequence: Synthetic peptide
CAVSPNDYKLSF

SEQ ID NO: 3348 - protein, 16 aa, Artificial Sequence
  Description of Artificial Sequence: Synthetic peptide
CAVRADRGSTLGRLYF

SEQ ID NO: 3349 - protein, 14 aa, Artificial Sequence
  Description of Artificial Sequence: Synthetic peptide
CAVSPASGTYKYIF

SEQ ID NO: 3350 - protein, 15 aa, Artificial Sequence
  Description of Artificial Sequence: Synthetic peptide
CAVEGVTGGGNKLTF

SEQ ID NO: 3351 - protein, 13 aa, Artificial Sequence
  Description of Artificial Sequence: Synthetic peptide
CSASGREDYGYTF

SEQ ID NO: 3352 - protein, 13 aa, Artificial Sequence
  Description of Artificial Sequence: Synthetic peptide
CSARDRGSYEQYF

SEQ ID NO: 3353 - protein, 12 aa, Artificial Sequence
  Description of Artificial Sequence: Synthetic peptide
CAISDPSLEAFF

SEQ ID NO: 3354 - protein, 18 aa, Artificial Sequence
  Description of Artificial Sequence: Synthetic peptide
CASSSYDRNGVASTEAFF

SEQ ID NO: 3355 - protein, 19 aa, Artificial Sequence
  Description of Artificial Sequence: Synthetic peptide
CASSEALWLAGPSYNEQFF

SEQ ID NO: 3356 - protein, 21 aa, Artificial Sequence
  Description of Artificial Sequence: Synthetic peptide
CSARPYQTFSGGTGPTDTQYF

SEQ ID NO: 3357 - protein, 12 aa, Artificial Sequence
  Description of Artificial Sequence: Synthetic peptide
CASSFGGNEQFF

SEQ ID NO: 3358 - protein, 12 aa, Artificial Sequence
  Description of Artificial Sequence: Synthetic peptide
CASSPGGTEAFF

SEQ ID NO: 3359 - protein, 13 aa, Artificial Sequence
  Description of Artificial Sequence: Synthetic peptide
CASSSNRGDEAFF

SEQ ID NO: 3360 - protein, 15 aa, Artificial Sequence
  Description of Artificial Sequence: Synthetic peptide
CASSPGTGNTDTQYF

SEQ ID NO: 3361 - protein, 15 aa, Artificial Sequence
  Description of Artificial Sequence: Synthetic peptide
CASSARGTSDGEQYF

SEQ ID NO: 3362 - protein, 16 aa, Artificial Sequence
  Description of Artificial Sequence: Synthetic peptide
CASSPSWGANTDTQYF

SEQ ID NO: 3363 - protein, 16 aa, Artificial Sequence
  Description of Artificial Sequence: Synthetic peptide
CASSWPGGGPLDEQFF

SEQ ID NO: 3364 - protein, 13 aa, Artificial Sequence
  Description of Artificial Sequence: Synthetic peptide
CASSHTTGLEQYF

SEQ ID NO: 3365 - protein, 12 aa, Artificial Sequence
  Description of Artificial Sequence: Synthetic peptide
CSVPTGTGELFF

SEQ ID NO: 3366 - protein, 15 aa, Artificial Sequence
  Description of Artificial Sequence: Synthetic peptide
CASSESNPGWYEQYF

SEQ ID NO: 3367 - protein, 16 aa, Artificial Sequence
  Description of Artificial Sequence: Synthetic peptide
CASSLTAGGITGELFF

SEQ ID NO: 3368 - protein, 15 aa, Artificial Sequence
  Description of Artificial Sequence: Synthetic peptide
CASSFARAKTGELFF

SEQ ID NO: 3369 - protein, 15 aa, Artificial Sequence
  Description of Artificial Sequence: Synthetic peptide
CASQSNVKSNQPQHF

SEQ ID NO: 3370 - protein, 13 aa, Artificial Sequence
  Description of Artificial Sequence: Synthetic peptide
CASSLAPGRGYTF

SEQ ID NO: 3371 - protein, 14 aa, Artificial Sequence
  Description of Artificial Sequence: Synthetic peptide
CASSFGQGLGEQYF

SEQ ID NO: 3372 - protein, 15 aa, Artificial Sequence
  Description of Artificial Sequence: Synthetic peptide
CASSLNRDSNQPQHF

SEQ ID NO: 3373 - protein, 17 aa, Artificial Sequence
  Description of Artificial Sequence: Synthetic peptide
CASSPTPRQGRAGEQYF

SEQ ID NO: 3374 - protein, 15 aa, Artificial Sequence
  Description of Artificial Sequence: Synthetic peptide
CASSGSPDRPYEQYF

SEQ ID NO: 3375 - protein, 13 aa, Artificial Sequence
  Description of Artificial Sequence: Synthetic peptide
CASSQGISYEQYF

SEQ ID NO: 3376 - protein, 17 aa, Artificial Sequence
  Description of Artificial Sequence: Synthetic peptide
CASSGGDISGLATEAFF

SEQ ID NO: 3377 - protein, 13 aa, Artificial Sequence
  Description of Artificial Sequence: Synthetic peptide
CASSLGSPGKLFF

SEQ ID NO: 3378 - protein, 11 aa, Artificial Sequence
  Description of Artificial Sequence: Synthetic peptide
CSLSGGREQFF

SEQ ID NO: 3379 - protein, 17 aa, Artificial Sequence
  Description of Artificial Sequence: Synthetic peptide
CASSMFLPGGPADTQYF

SEQ ID NO: 3380 - protein, 14 aa, Artificial Sequence
  Description of Artificial Sequence: Synthetic peptide
CASSVGGAGYEQYF

SEQ ID NO: 3381 - protein, 13 aa, Artificial Sequence
  Description of Artificial Sequence: Synthetic peptide
CASSFPRSYEQYF

SEQ ID NO: 3382 - protein, 19 aa, Artificial Sequence
  Description of Artificial Sequence: Synthetic peptide
CASSQGYFPSGLEVNEQFF

SEQ ID NO: 3383 - protein, 15 aa, Artificial Sequence
  Description of Artificial Sequence: Synthetic peptide
CASSLGQGFYTEAFF

SEQ ID NO: 3384 - protein, 14 aa, Artificial Sequence
  Description of Artificial Sequence: Synthetic peptide
CAISESLGRYEQYF

SEQ ID NO: 3385 - protein, 14 aa, Artificial Sequence
  Description of Artificial Sequence: Synthetic peptide
CASSLLGPHTEAFF

SEQ ID NO: 3386 - protein, 17 aa, Artificial Sequence
  Description of Artificial Sequence: Synthetic peptide
CASSPGTGRFSGNTIYF

SEQ ID NO: 3387 - protein, 15 aa, Artificial Sequence
  Description of Artificial Sequence: Synthetic peptide
CASSQGQMFVYEQYF

SEQ ID NO: 3388 - protein, 19 aa, Artificial Sequence
  Description of Artificial Sequence: Synthetic peptide
CASSLPKGGGMDSYNEQFF

SEQ ID NO: 3389 - protein, 16 aa, Artificial Sequence
  Description of Artificial Sequence: Synthetic peptide
CASSLPSGGAYNEQFF

SEQ ID NO: 3390 - protein, 13 aa, Artificial Sequence
  Description of Artificial Sequence: Synthetic peptide
CASSITNTYEQYF

SEQ ID NO: 3391 - protein, 13 aa, Artificial Sequence
  Description of Artificial Sequence: Synthetic peptide
CASSLASKGLGFF

SEQ ID NO: 3392 - protein, 14 aa, Artificial Sequence
  Description of Artificial Sequence: Synthetic peptide
CASSVEGAQETQYF

SEQ ID NO: 3393 - protein, 16 aa, Artificial Sequence
  Description of Artificial Sequence: Synthetic peptide
CASSGSGTGGSGGYTF

SEQ ID NO: 3394 - protein, 12 aa, Artificial Sequence
  Description of Artificial Sequence: Synthetic peptide
CASSPVAGELFF

SEQ ID NO: 3395 - protein, 16 aa, Artificial Sequence
  Description of Artificial Sequence: Synthetic peptide
CATSEGQESHTGELFF

SEQ ID NO: 3396 - protein, 16 aa, Artificial Sequence
  Description of Artificial Sequence: Synthetic peptide
CASSLVPGSSIYEQYF

SEQ ID NO: 3397 - protein, 13 aa, Artificial Sequence
  Description of Artificial Sequence: Synthetic peptide
CASSERGSYEQYF

SEQ ID NO: 3398 - protein, 15 aa, Artificial Sequence
  Description of Artificial Sequence: Synthetic peptide
CASRSRANPYNEQFF

SEQ ID NO: 3399 - protein, 16 aa, Artificial Sequence
  Description of Artificial Sequence: Synthetic peptide
CASSVNTGEGSYGYTF

SEQ ID NO: 3400 - protein, 16 aa, Artificial Sequence
  Description of Artificial Sequence: Synthetic peptide
CASSNPFRGENTEAFF

SEQ ID NO: 3401 - protein, 14 aa, Artificial Sequence
  Description of Artificial Sequence: Synthetic peptide
CASSQAVTGHEQFF

SEQ ID NO: 3402 - protein, 13 aa, Artificial Sequence
  Description of Artificial Sequence: Synthetic peptide
CASSVASSYEQYF

SEQ ID NO: 3403 - protein, 18 aa, Artificial Sequence
  Description of Artificial Sequence: Synthetic peptide
CASSQENWGLLGAETQYF

SEQ ID NO: 3404 - protein, 14 aa, Artificial Sequence
  Description of Artificial Sequence: Synthetic peptide
CASSFTADVYGYTF

SEQ ID NO: 3405 - protein, 15 aa, Artificial Sequence
  Description of Artificial Sequence: Synthetic peptide
CASSLVTGQGDGYTF

SEQ ID NO: 3406 - protein, 15 aa, Artificial Sequence
  Description of Artificial Sequence: Synthetic peptide
CASSGRQGGLYEQYF

SEQ ID NO: 3407 - protein, 13 aa, Artificial Sequence
  Description of Artificial Sequence: Synthetic peptide
CASSGTYTDTQYF

SEQ ID NO: 3408 - protein, 15 aa, Artificial Sequence
  Description of Artificial Sequence: Synthetic peptide
CASSLSGTGVDEQYF

SEQ ID NO: 3409 - protein, 15 aa, Artificial Sequence
  Description of Artificial Sequence: Synthetic peptide
CASSYAGTNTGELFF

SEQ ID NO: 3410 - protein, 12 aa, Artificial Sequence
  Description of Artificial Sequence: Synthetic peptide
CTGPRFTDTQYF

SEQ ID NO: 3411 - protein, 14 aa, Artificial Sequence
  Description of Artificial Sequence: Synthetic peptide
CASSLSSGFFGYTF

SEQ ID NO: 3412 - protein, 14 aa, Artificial Sequence
  Description of Artificial Sequence: Synthetic peptide
CASSFGGEGDIQYF

SEQ ID NO: 3413 - protein, 14 aa, Artificial Sequence
  Description of Artificial Sequence: Synthetic peptide
CASSPETGTYEQYF

SEQ ID NO: 3414 - protein, 15 aa, Artificial Sequence
  Description of Artificial Sequence: Synthetic peptide
CASSPRQGAGTEAFF

SEQ ID NO: 3415 - protein, 15 aa, Artificial Sequence
  Description of Artificial Sequence: Synthetic peptide
CASSSDRVVAGELFF

SEQ ID NO: 3416 - protein, 13 aa, Artificial Sequence
  Description of Artificial Sequence: Synthetic peptide
CASGRGVLEKLFF

SEQ ID NO: 3417 - protein, 13 aa, Artificial Sequence
  Description of Artificial Sequence: Synthetic peptide
CASSFGTNTEAFF

SEQ ID NO: 3418 - protein, 14 aa, Artificial Sequence
  Description of Artificial Sequence: Synthetic peptide
CASSLGREWYEQYF

SEQ ID NO: 3419 - protein, 15 aa, Artificial Sequence
  Description of Artificial Sequence: Synthetic peptide
CASSVDGGGVNEQFF

SEQ ID NO: 3420 - protein, 15 aa, Artificial Sequence
  Description of Artificial Sequence: Synthetic peptide
CASSLAGHVNQPQHF

SEQ ID NO: 3421 - protein, 14 aa, Artificial Sequence
  Description of Artificial Sequence: Synthetic peptide
CASMPGERPYEQYF

SEQ ID NO: 3422 - protein, 13 aa, Artificial Sequence
  Description of Artificial Sequence: Synthetic peptide
CASSATGAYEQYF

SEQ ID NO: 3423 - protein, 14 aa, Artificial Sequence
  Description of Artificial Sequence: Synthetic peptide
CASSMSGNTGELFF

SEQ ID NO: 3424 - protein, 14 aa, Artificial Sequence
  Description of Artificial Sequence: Synthetic peptide
CASSIIGGSTEAFF

SEQ ID NO: 3425 - protein, 15 aa, Artificial Sequence
  Description of Artificial Sequence: Synthetic peptide
CASSILAGGYNEQFF

SEQ ID NO: 3426 - protein, 16 aa, Artificial Sequence
  Description of Artificial Sequence: Synthetic peptide
CASSSPLSGGGDIQYF

SEQ ID NO: 3427 - protein, 13 aa, Artificial Sequence
  Description of Artificial Sequence: Synthetic peptide
CASSSNGGQPQHF

SEQ ID NO: 3428 - protein, 15 aa, Artificial Sequence
  Description of Artificial Sequence: Synthetic peptide
CASSLVGTGHYGYTF

SEQ ID NO: 3429 - protein, 17 aa, Artificial Sequence
  Description of Artificial Sequence: Synthetic peptide
CASSEQDQLSSYNEQFF

SEQ ID NO: 3430 - protein, 15 aa, Artificial Sequence
  Description of Artificial Sequence: Synthetic peptide
CASSVYRASSYEQYF

SEQ ID NO: 3431 - protein, 16 aa, Artificial Sequence
  Description of Artificial Sequence: Synthetic peptide
CASSTGTSLTVYGYTF

SEQ ID NO: 3432 - protein, 16 aa, Artificial Sequence
  Description of Artificial Sequence: Synthetic peptide
CASSPRLAGAYNEQFF

SEQ ID NO: 3433 - protein, 12 aa, Artificial Sequence
  Description of Artificial Sequence: Synthetic peptide
CASSLGGTEAFF

SEQ ID NO: 3434 - protein, 14 aa, Artificial Sequence
  Description of Artificial Sequence: Synthetic peptide
CASSAGGANTEAFF

SEQ ID NO: 3435 - protein, 17 aa, Artificial Sequence
  Description of Artificial Sequence: Synthetic peptide
CASSLARAGGLTGELFF

SEQ ID NO: 3436 - protein, 14 aa, Artificial Sequence
  Description of Artificial Sequence: Synthetic peptide
CATSGGTRHNEQFF

SEQ ID NO: 3437 - protein, 13 aa, Artificial Sequence
  Description of Artificial Sequence: Synthetic peptide
CASSLAGYSPLHF

SEQ ID NO: 3438 - protein, 16 aa, Artificial Sequence
  Description of Artificial Sequence: Synthetic peptide
CASSSRGGLDTGELFF

SEQ ID NO: 3439 - protein, 12 aa, Artificial Sequence
  Description of Artificial Sequence: Synthetic peptide
CASSLGIADYTF

SEQ ID NO: 3440 - protein, 15 aa, Artificial Sequence
  Description of Artificial Sequence: Synthetic peptide
CASSLGWGPNTEAFF

SEQ ID NO: 3441 - protein, 18 aa, Artificial Sequence
  Description of Artificial Sequence: Synthetic peptide
CASSSGLAAYSGANVLTF

SEQ ID NO: 3442 - protein, 17 aa, Artificial Sequence
  Description of Artificial Sequence: Synthetic peptide
CAISDPWQGYSGNTIYF

SEQ ID NO: 3443 - protein, 13 aa, Artificial Sequence
  Description of Artificial Sequence: Synthetic peptide
CASSLARGETQYF

SEQ ID NO: 3444 - protein, 15 aa, Artificial Sequence
  Description of Artificial Sequence: Synthetic peptide
CASSYSSSSNQPQHF

SEQ ID NO: 3445 - protein, 14 aa, Artificial Sequence
  Description of Artificial Sequence: Synthetic peptide
CASSPGTSYNEQFF

SEQ ID NO: 3446 - protein, 12 aa, Artificial Sequence
  Description of Artificial Sequence: Synthetic peptide
CSVVDQDTEAFF

SEQ ID NO: 3447 - protein, 13 aa, Artificial Sequence
  Description of Artificial Sequence: Synthetic peptide
CASSFQGNQPQHF

SEQ ID NO: 3448 - protein, 16 aa, Artificial Sequence
  Description of Artificial Sequence: Synthetic peptide
CASSAQGAGANEKLFF

SEQ ID NO: 3449 - protein, 12 aa, Artificial Sequence
  Description of Artificial Sequence: Synthetic peptide
CASKGDGYEQYF

SEQ ID NO: 3450 - protein, 15 aa, Artificial Sequence
  Description of Artificial Sequence: Synthetic peptide
CASSIMAGGLGEQFF

SEQ ID NO: 3451 - protein, 14 aa, Artificial Sequence
  Description of Artificial Sequence: Synthetic peptide
CASSPQTGEVRVFF

SEQ ID NO: 3452 - protein, 12 aa, Artificial Sequence
  Description of Artificial Sequence: Synthetic peptide
CASSFLNNEQFF

SEQ ID NO: 3453 - protein, 13 aa, Artificial Sequence
  Description of Artificial Sequence: Synthetic peptide
CASSVAGEQPQHF

SEQ ID NO: 3454 - protein, 15 aa, Artificial Sequence
  Description of Artificial Sequence: Synthetic peptide
CASSATGGAWYGYTF

SEQ ID NO: 3455 - protein, 14 aa, Artificial Sequence
  Description of Artificial Sequence: Synthetic peptide
CASSQASGPNEQFF

SEQ ID NO: 3456 - protein, 15 aa, Artificial Sequence
  Description of Artificial Sequence: Synthetic peptide
CATSQQGAGTDTQYF

SEQ ID NO: 3457 - protein, 16 aa, Artificial Sequence
  Description of Artificial Sequence: Synthetic peptide
CASSLVTGHYNSPLHF

SEQ ID NO: 3458 - protein, 14 aa, Artificial Sequence
  Description of Artificial Sequence: Synthetic peptide
CASSFRGLNTEAFF

SEQ ID NO: 3459 - protein, 14 aa, Artificial Sequence
  Description of Artificial Sequence: Synthetic peptide
CASSPPTNLETQYF

SEQ ID NO: 3460 - protein, 15 aa, Artificial Sequence
  Description of Artificial Sequence: Synthetic peptide
CSARPQDLSGNTIYF

SEQ ID NO: 3461 - protein, 13 aa, Artificial Sequence
  Description of Artificial Sequence: Synthetic peptide
CASSLASVEEAFF

SEQ ID NO: 3462 - protein, 15 aa, Artificial Sequence
  Description of Artificial Sequence: Synthetic peptide
CSVEEDRDRGYEQYF

SEQ ID NO: 3463 - protein, 13 aa, Artificial Sequence
  Description of Artificial Sequence: Synthetic peptide
CASSLITEIEAFF

SEQ ID NO: 3464 - protein, 15 aa, Artificial Sequence
  Description of Artificial Sequence: Synthetic peptide
CASSTPDRVWTEAFF

SEQ ID NO: 3465 - protein, 14 aa, Artificial Sequence
  Description of Artificial Sequence: Synthetic peptide
CASSIQGMAYEQYF

SEQ ID NO: 3466 - protein, 15 aa, Artificial Sequence
  Description of Artificial Sequence: Synthetic peptide
CATSRDLSNQETQYF

SEQ ID NO: 3467 - protein, 14 aa, Artificial Sequence
  Description of Artificial Sequence: Synthetic peptide
CASSVSGYNEKLFF

SEQ ID NO: 3468 - protein, 15 aa, Artificial Sequence
  Description of Artificial Sequence: Synthetic peptide
CASSPSLGMNTEAFF

SEQ ID NO: 3469 - protein, 14 aa, Artificial Sequence
  Description of Artificial Sequence: Synthetic peptide
CASSLGGSNQPQHF

SEQ ID NO: 3470 - protein, 17 aa, Artificial Sequence
  Description of Artificial Sequence: Synthetic peptide
CASSSLGGTHSNQPQHF

SEQ ID NO: 3471 - protein, 14 aa, Artificial Sequence
  Description of Artificial Sequence: Synthetic peptide
CASIGTSGNNEQFF

SEQ ID NO: 3472 - protein, 14 aa, Artificial Sequence
  Description of Artificial Sequence: Synthetic peptide
CASSLGGLNTEAFF

SEQ ID NO: 3473 - protein, 14 aa, Artificial Sequence
  Description of Artificial Sequence: Synthetic peptide
CASSLRRYQETQYF

SEQ ID NO: 3474 - protein, 13 aa, Artificial Sequence
  Description of Artificial Sequence: Synthetic peptide
CASSSGILYEQYF

SEQ ID NO: 3475 - protein, 14 aa, Artificial Sequence
  Description of Artificial Sequence: Synthetic peptide
CASSWTGTADEQYF

SEQ ID NO: 3476 - protein, 13 aa, Artificial Sequence
  Description of Artificial Sequence: Synthetic peptide
CASSPTGNNEQFF

SEQ ID NO: 3477 - protein, 12 aa, Artificial Sequence
  Description of Artificial Sequence: Synthetic peptide
CASGFDIGELFF

SEQ ID NO: 3478 - protein, 13 aa, Artificial Sequence
  Description of Artificial Sequence: Synthetic peptide
CASSQTHYNEQFF

SEQ ID NO: 3479 - protein, 14 aa, Artificial Sequence
  Description of Artificial Sequence: Synthetic peptide
CASSAGGGFTEAFF

SEQ ID NO: 3480 - protein, 15 aa, Artificial Sequence
  Description of Artificial Sequence: Synthetic peptide
CASSPRDRVPGELFF

SEQ ID NO: 3481 - protein, 15 aa, Artificial Sequence
  Description of Artificial Sequence: Synthetic peptide
CASSLDRGPQETQYF

SEQ ID NO: 3482 - protein, 14 aa, Artificial Sequence
  Description of Artificial Sequence: Synthetic peptide
CASSRTGDNYGYTF

SEQ ID NO: 3483 - protein, 16 aa, Artificial Sequence
  Description of Artificial Sequence: Synthetic peptide
CASSPGGQGWEDTQYF

SEQ ID NO: 3484 - protein, 13 aa, Artificial Sequence
  Description of Artificial Sequence: Synthetic peptide
CASSLTGPTEAFF

SEQ ID NO: 3485 - protein, 13 aa, Artificial Sequence
  Description of Artificial Sequence: Synthetic peptide
CASSLLGGDEQYF

SEQ ID NO: 3486 - protein, 13 aa, Artificial Sequence
  Description of Artificial Sequence: Synthetic peptide
CASSLPSNEKLFF

SEQ ID NO: 3487 - protein, 10 aa, Artificial Sequence
  Description of Artificial Sequence: Synthetic peptide
CASSSNEQFF

SEQ ID NO: 3488 - protein, 13 aa, Artificial Sequence
  Description of Artificial Sequence: Synthetic peptide
CASSTTSGYEQYF

SEQ ID NO: 3489 - protein, 14 aa, Artificial Sequence
  Description of Artificial Sequence: Synthetic peptide
CASSWTGTDYEQYF

SEQ ID NO: 3490 - protein, 14 aa, Artificial Sequence
  Description of Artificial Sequence: Synthetic peptide
CASSFEGFSYEQYF

SEQ ID NO: 3491 - protein, 15 aa, Artificial Sequence
  Description of Artificial Sequence: Synthetic peptide
CASSFHLQGPYGYTF

SEQ ID NO: 3492 - protein, 13 aa, Artificial Sequence
  Description of Artificial Sequence: Synthetic peptide
CASSQVEGTEAFF

SEQ ID NO: 3493 - protein, 12 aa, Artificial Sequence
  Description of Artificial Sequence: Synthetic peptide
CASSPLRPEAFF

SEQ ID NO: 3494 - protein, 15 aa, Artificial Sequence
  Description of Artificial Sequence: Synthetic peptide
CASNLGGTDGSPLHF

SEQ ID NO: 3495 - protein, 15 aa, Artificial Sequence
  Description of Artificial Sequence: Synthetic peptide
CASSQEAGRNYEQYF

SEQ ID NO: 3496 - protein, 13 aa, Artificial Sequence
  Description of Artificial Sequence: Synthetic peptide
CASSITAFYGYTF

SEQ ID NO: 3497 - protein, 13 aa, Artificial Sequence
  Description of Artificial Sequence: Synthetic peptide
CASSRGLDTEAFF

SEQ ID NO: 3498 - protein, 14 aa, Artificial Sequence
  Description of Artificial Sequence: Synthetic peptide
CASSLSVSDYEQYF

SEQ ID NO: 3499 - protein, 15 aa, Artificial Sequence
  Description of Artificial Sequence: Synthetic peptide
CASSLGAQLHYGYTF

SEQ ID NO: 3500 - protein, 15 aa, Artificial Sequence
  Description of Artificial Sequence: Synthetic peptide
CASSHRGGVTDTQYF

SEQ ID NO: 3501 - protein, 17 aa, Artificial Sequence
  Description of Artificial Sequence: Synthetic peptide
CASSYSGGASSYNEQFF

SEQ ID NO: 3502 - protein, 15 aa, Artificial Sequence
  Description of Artificial Sequence: Synthetic peptide
CASSLAETSTDTQYF

SEQ ID NO: 3503 - protein, 13 aa, Artificial Sequence
  Description of Artificial Sequence: Synthetic peptide
CASSQFAGGPQYF

SEQ ID NO: 3504 - protein, 14 aa, Artificial Sequence
  Description of Artificial Sequence: Synthetic peptide
CASSPRGGRQPQHF

SEQ ID NO: 3505 - protein, 11 aa, Artificial Sequence
  Description of Artificial Sequence: Synthetic peptide
CASKLGGGAFF

SEQ ID NO: 3506 - protein, 12 aa, Artificial Sequence
  Description of Artificial Sequence: Synthetic peptide
CASRDVGYEQYF

SEQ ID NO: 3507 - protein, 15 aa, Artificial Sequence
  Description of Artificial Sequence: Synthetic peptide
CASSPDRGRNYGYTF

SEQ ID NO: 3508 - protein, 13 aa, Artificial Sequence
  Description of Artificial Sequence: Synthetic peptide
CSAKRASYNEQFF

SEQ ID NO: 3509 - protein, 18 aa, Artificial Sequence
  Description of Artificial Sequence: Synthetic peptide
CASGLPPAGGPSYNEQFF

SEQ ID NO: 3510 - protein, 17 aa, Artificial Sequence
  Description of Artificial Sequence: Synthetic peptide
CASSVAATSGGTDTQYF

SEQ ID NO: 3511 - protein, 16 aa, Artificial Sequence
  Description of Artificial Sequence: Synthetic peptide
CASSLYGRGVTDTQYF

SEQ ID NO: 3512 - protein, 14 aa, Artificial Sequence
  Description of Artificial Sequence: Synthetic peptide
CASSYSPGRSGYTF

SEQ ID NO: 3513 - protein, 15 aa, Artificial Sequence
  Description of Artificial Sequence: Synthetic peptide
CASSLETGGHQPQHF

SEQ ID NO: 3514 - protein, 15 aa, Artificial Sequence
  Description of Artificial Sequence: Synthetic peptide
CASSWGDRATDTQYF

SEQ ID NO: 3515 - protein, 15 aa, Artificial Sequence
  Description of Artificial Sequence: Synthetic peptide
CASSLGADRNTEAFF

SEQ ID NO: 3516 - protein, 15 aa, Artificial Sequence
  Description of Artificial Sequence: Synthetic peptide
CASSLDRNSGNTIYF

SEQ ID NO: 3517 - protein, 16 aa, Artificial Sequence
  Description of Artificial Sequence: Synthetic peptide
CASSSRGQGASGEQYF

SEQ ID NO: 3518 - protein, 12 aa, Artificial Sequence
  Description of Artificial Sequence: Synthetic peptide
CALRDLYNEQFF

SEQ ID NO: 3519 - protein, 17 aa, Artificial Sequence
  Description of Artificial Sequence: Synthetic peptide
CASSHGTGGWFDYGYTF

SEQ ID NO: 3520 - protein, 16 aa, Artificial Sequence
  Description of Artificial Sequence: Synthetic peptide
CASSFQTGWEFYGYTF

SEQ ID NO: 3521 - protein, 12 aa, Artificial Sequence
  Description of Artificial Sequence: Synthetic peptide
CSVYTENTEAFF

SEQ ID NO: 3522 - protein, 15 aa, Artificial Sequence
  Description of Artificial Sequence: Synthetic peptide
CATSDQNRGHEKLFF

SEQ ID NO: 3523 - protein, 15 aa, Artificial Sequence
  Description of Artificial Sequence: Synthetic peptide
CASSIMGTAYYGYTF

SEQ ID NO: 3524 - protein, 14 aa, Artificial Sequence
  Description of Artificial Sequence: Synthetic peptide
CASSVGDRGYEQYF

SEQ ID NO: 3525 - protein, 13 aa, Artificial Sequence
  Description of Artificial Sequence: Synthetic peptide
CASSVGGWTEAFF

SEQ ID NO: 3526 - protein, 12 aa, Artificial Sequence
  Description of Artificial Sequence: Synthetic peptide
CATEGAYEKLFF

SEQ ID NO: 3527 - protein, 13 aa, Artificial Sequence
  Description of Artificial Sequence: Synthetic peptide
CASSQGPTGEQYF

SEQ ID NO: 3528 - protein, 16 aa, Artificial Sequence
  Description of Artificial Sequence: Synthetic peptide
CASSRTSGGAPGELFF

SEQ ID NO: 3529 - protein, 15 aa, Artificial Sequence
  Description of Artificial Sequence: Synthetic peptide
CASSHPLSGGYEQFF

SEQ ID NO: 3530 - protein, 10 aa, Artificial Sequence
  Description of Artificial Sequence: Synthetic peptide
CASSGTEAFF

SEQ ID NO: 3531 - protein, 14 aa, Artificial Sequence
  Description of Artificial Sequence: Synthetic peptide
CASLGQGNNQPQHF

SEQ ID NO: 3532 - protein, 14 aa, Artificial Sequence
  Description of Artificial Sequence: Synthetic peptide
CASSLDRAGKTQYF

SEQ ID NO: 3533 - protein, 14 aa, Artificial Sequence
  Description of Artificial Sequence: Synthetic peptide
CASSLAGSYNEQFF

SEQ ID NO: 3534 - protein, 12 aa, Artificial Sequence
  Description of Artificial Sequence: Synthetic peptide
CASSVGDHTIYF

SEQ ID NO: 3535 - protein, 15 aa, Artificial Sequence
  Description of Artificial Sequence: Synthetic peptide
CASSVEGDVWEEAFF

SEQ ID NO: 3536 - protein, 16 aa, Artificial Sequence
  Description of Artificial Sequence: Synthetic peptide
CASSGSLGQMNTEAFF

SEQ ID NO: 3537 - protein, 14 aa, Artificial Sequence
  Description of Artificial Sequence: Synthetic peptide
CASSWTGRNQPQHF

SEQ ID NO: 3538 - protein, 13 aa, Artificial Sequence
  Description of Artificial Sequence: Synthetic peptide
CASSFYRANEQFF

SEQ ID NO: 3539 - protein, 13 aa, Artificial Sequence
  Description of Artificial Sequence: Synthetic peptide
CASSSSGGYEQYF

SEQ ID NO: 3540 - protein, 12 aa, Artificial Sequence
  Description of Artificial Sequence: Synthetic peptide
CASTGRNTEAFF

SEQ ID NO: 3541 - protein, 14 aa, Artificial Sequence
  Description of Artificial Sequence: Synthetic peptide
CASSLGEFYNEQFF

SEQ ID NO: 3542 - protein, 14 aa, Artificial Sequence
  Description of Artificial Sequence: Synthetic peptide
CASGRTGLYTEAFF

SEQ ID NO: 3543 - protein, 14 aa, Artificial Sequence
  Description of Artificial Sequence: Synthetic peptide
CATSEAGMNTEAFF

SEQ ID NO: 3544 - protein, 15 aa, Artificial Sequence
  Description of Artificial Sequence: Synthetic peptide
CSARDHTSGTYEQYF

SEQ ID NO: 3545 - protein, 15 aa, Artificial Sequence
  Description of Artificial Sequence: Synthetic peptide
CASSEGINLSYEQYF

SEQ ID NO: 3546 - protein, 14 aa, Artificial Sequence
  Description of Artificial Sequence: Synthetic peptide
CASSPQPTNSPLHF

SEQ ID NO: 3547 - protein, 14 aa, Artificial Sequence
  Description of Artificial Sequence: Synthetic peptide
CASSSTASSYEQYF

SEQ ID NO: 3548 - protein, 14 aa, Artificial Sequence
  Description of Artificial Sequence: Synthetic peptide
CASSTGTRGNEQFF

SEQ ID NO: 3549 - protein, 15 aa, Artificial Sequence
  Description of Artificial Sequence: Synthetic peptide
CASSSGQLAKNIQYF

SEQ ID NO: 3550 - protein, 15 aa, Artificial Sequence
  Description of Artificial Sequence: Synthetic peptide
CASSPPETGGLEQYF

SEQ ID NO: 3551 - protein, 15 aa, Artificial Sequence
  Description of Artificial Sequence: Synthetic peptide
CASSLRQPTNEKLFF

SEQ ID NO: 3552 - protein, 14 aa, Artificial Sequence
  Description of Artificial Sequence: Synthetic peptide
CASSVGGGTDTQYF

SEQ ID NO: 3553 - protein, 11 aa, Artificial Sequence
  Description of Artificial Sequence: Synthetic peptide
CRAAIESGYTF

SEQ ID NO: 3554 - protein, 11 aa, Artificial Sequence
  Description of Artificial Sequence: Synthetic peptide
CAWKIQGVEFF

SEQ ID NO: 3555 - protein, 14 aa, Artificial Sequence
  Description of Artificial Sequence: Synthetic peptide
CSARAWGGNTEAFF

SEQ ID NO: 3556 - protein, 15 aa, Artificial Sequence
  Description of Artificial Sequence: Synthetic peptide
CASSVGTSGVKELFF

SEQ ID NO: 3557 - protein, 16 aa, Artificial Sequence
  Description of Artificial Sequence: Synthetic peptide
CASSLRGGPANYGYTF

SEQ ID NO: 3558 - protein, 13 aa, Artificial Sequence
  Description of Artificial Sequence: Synthetic peptide
CASSPGFTGELFF

SEQ ID NO: 3559 - protein, 14 aa, Artificial Sequence
  Description of Artificial Sequence: Synthetic peptide
CASSLGQSWYGYTF

SEQ ID NO: 3560 - protein, 14 aa, Artificial Sequence
  Description of Artificial Sequence: Synthetic peptide
CASSWKISSYEQYF

SEQ ID NO: 3561 - protein, 14 aa, Artificial Sequence
  Description of Artificial Sequence: Synthetic peptide
CASRGLAGPYEQYF

SEQ ID NO: 3562 - protein, 17 aa, Artificial Sequence
  Description of Artificial Sequence: Synthetic peptide
CSGRGLADEWGSYEQYF

SEQ ID NO: 3563 - protein, 13 aa, Artificial Sequence
  Description of Artificial Sequence: Synthetic peptide
CASSLGQGDRYTF

SEQ ID NO: 3564 - protein, 15 aa, Artificial Sequence
  Description of Artificial Sequence: Synthetic peptide
CASSTGQGAYNEQFF

SEQ ID NO: 3565 - protein, 15 aa, Artificial Sequence
  Description of Artificial Sequence: Synthetic peptide
CSARDNVGGRTEAFF

SEQ ID NO: 3566 - protein, 15 aa, Artificial Sequence
  Description of Artificial Sequence: Synthetic peptide
CSVERRAGGLNEQFF

SEQ ID NO: 3567 - protein, 14 aa, Artificial Sequence
  Description of Artificial Sequence: Synthetic peptide
CATSGSGVPDTQYF

SEQ ID NO: 3568 - protein, 14 aa, Artificial Sequence
  Description of Artificial Sequence: Synthetic peptide
CASSTGLAEYEQFF

SEQ ID NO: 3569 - protein, 15 aa, Artificial Sequence
  Description of Artificial Sequence: Synthetic peptide
CASSLRGVSVYEQYF

SEQ ID NO: 3570 - protein, 16 aa, Artificial Sequence
  Description of Artificial Sequence: Synthetic peptide
CASSLSLIAGANVLTF

SEQ ID NO: 3571 - protein, 14 aa, Artificial Sequence
  Description of Artificial Sequence: Synthetic peptide
CASSEAGADYGYTF

SEQ ID NO: 3572 - protein, 14 aa, Artificial Sequence
  Description of Artificial Sequence: Synthetic peptide
CASSHGNVGYEQYF

SEQ ID NO: 3573 - protein, 12 aa, Artificial Sequence
  Description of Artificial Sequence: Synthetic peptide
CATSGGTGELFF

SEQ ID NO: 3574 - protein, 18 aa, Artificial Sequence
  Description of Artificial Sequence: Synthetic peptide
CASRSTGTGGAGGEPQHF

SEQ ID NO: 3575 - protein, 12 aa, Artificial Sequence
  Description of Artificial Sequence: Synthetic peptide
CASSLTGYEQYF

SEQ ID NO: 3576 - protein, 16 aa, Artificial Sequence
  Description of Artificial Sequence: Synthetic peptide
CASSLDRASSYNEQFF

SEQ ID NO: 3577 - protein, 14 aa, Artificial Sequence
  Description of Artificial Sequence: Synthetic peptide
CASRGLTGGTEAFF

SEQ ID NO: 3578 - protein, 14 aa, Artificial Sequence
  Description of Artificial Sequence: Synthetic peptide
CASSLRNPNTEAFF

SEQ ID NO: 3579 - protein, 14 aa, Artificial Sequence
  Description of Artificial Sequence: Synthetic peptide
CASSLVGNTGELFF

SEQ ID NO: 3580 - protein, 16 aa, Artificial Sequence
  Description of Artificial Sequence: Synthetic peptide
CSARDEDRGLQETQYF

SEQ ID NO: 3581 - protein, 14 aa, Artificial Sequence
  Description of Artificial Sequence: Synthetic peptide
CASSQDQVRETQYF

SEQ ID NO: 3582 - protein, 14 aa, Artificial Sequence
  Description of Artificial Sequence: Synthetic peptide
CASSLAGLDTEAFF

SEQ ID NO: 3583 - protein, 16 aa, Artificial Sequence
  Description of Artificial Sequence: Synthetic peptide
CASSTGQGWDTGELFF

SEQ ID NO: 3584 - protein, 12 aa, Artificial Sequence
  Description of Artificial Sequence: Synthetic peptide
CSARGTSYEQYF

SEQ ID NO: 3585 - protein, 14 aa, Artificial Sequence
  Description of Artificial Sequence: Synthetic peptide
CASSDRGGTDTQYF

SEQ ID NO: 3586 - protein, 13 aa, Artificial Sequence
  Description of Artificial Sequence: Synthetic peptide
CASSFGFNSPLHF

SEQ ID NO: 3587 - protein, 11 aa, Artificial Sequence
  Description of Artificial Sequence: Synthetic peptide
CASRWGTEAFF

SEQ ID NO: 3588 - protein, 13 aa, Artificial Sequence
  Description of Artificial Sequence: Synthetic peptide
CSGRLTENYGYTF

SEQ ID NO: 3589 - protein, 14 aa, Artificial Sequence
  Description of Artificial Sequence: Synthetic peptide
CASSFRGRRAEAFF

SEQ ID NO: 3590 - protein, 19 aa, Artificial Sequence
  Description of Artificial Sequence: Synthetic peptide
CASSVDSKGQGPGANVLTF

SEQ ID NO: 3591 - protein, 14 aa, Artificial Sequence
  Description of Artificial Sequence: Synthetic peptide
CASSEGGTAYEQYF

SEQ ID NO: 3592 - protein, 14 aa, Artificial Sequence
  Description of Artificial Sequence: Synthetic peptide
CASSEFRAAYEQYF

SEQ ID NO: 3593 - protein, 13 aa, Artificial Sequence
  Description of Artificial Sequence: Synthetic peptide
CASSVTGGTEAFF

SEQ ID NO: 3594 - protein, 12 aa, Artificial Sequence
  Description of Artificial Sequence: Synthetic peptide
CASSLDAYEQFF

SEQ ID NO: 3595 - protein, 15 aa, Artificial Sequence
  Description of Artificial Sequence: Synthetic peptide
CASSQVWGANTEAFF

SEQ ID NO: 3596 - protein, 14 aa, Artificial Sequence
  Description of Artificial Sequence: Synthetic peptide
CASSVAGETYEQYF

SEQ ID NO: 3597 - protein, 13 aa, Artificial Sequence
  Description of Artificial Sequence: Synthetic peptide
CASSTDSYNEQFF

SEQ ID NO: 3598 - protein, 14 aa, Artificial Sequence
  Description of Artificial Sequence: Synthetic peptide
CASSVRDGGTEAFF

SEQ ID NO: 3599 - protein, 15 aa, Artificial Sequence
  Description of Artificial Sequence: Synthetic peptide
CASSEWVWTGRTQYF

SEQ ID NO: 3600 - protein, 17 aa, Artificial Sequence
  Description of Artificial Sequence: Synthetic peptide
CASSPLPGQAEVGGYTF

SEQ ID NO: 3601 - protein, 15 aa, Artificial Sequence
  Description of Artificial Sequence: Synthetic peptide
CASSQGRQGGYEQYF

SEQ ID NO: 3602 - protein, 17 aa, Artificial Sequence
  Description of Artificial Sequence: Synthetic peptide
CASSVQPGQGALNEQYF

SEQ ID NO: 3603 - protein, 15 aa, Artificial Sequence
  Description of Artificial Sequence: Synthetic peptide
CASSRQDGNFYEQYF

SEQ ID NO: 3604 - protein, 13 aa, Artificial Sequence
  Description of Artificial Sequence: Synthetic peptide
CASSLGGGWGYTF

SEQ ID NO: 3605 - protein, 15 aa, Artificial Sequence
  Description of Artificial Sequence: Synthetic peptide
CASSPSGFRGQPQHF

SEQ ID NO: 3606 - protein, 15 aa, Artificial Sequence
  Description of Artificial Sequence: Synthetic peptide
CASSPEGSSYNEQFF

SEQ ID NO: 3607 - protein, 12 aa, Artificial Sequence
  Description of Artificial Sequence: Synthetic peptide
CASRSDSYEQYF

SEQ ID NO: 3608 - protein, 15 aa, Artificial Sequence
  Description of Artificial Sequence: Synthetic peptide
CASSLIQGNTGELFF

SEQ ID NO: 3609 - protein, 13 aa, Artificial Sequence
  Description of Artificial Sequence: Synthetic peptide
CATMERDTGELFF

SEQ ID NO: 3610 - protein, 13 aa, Artificial Sequence
  Description of Artificial Sequence: Synthetic peptide
CASSLSGYNEQFF

SEQ ID NO: 3611 - protein, 13 aa, Artificial Sequence
  Description of Artificial Sequence: Synthetic peptide
CASSVGEGYEQYF

SEQ ID NO: 3612 - protein, 13 aa, Artificial Sequence
  Description of Artificial Sequence: Synthetic peptide
CASSEDAYYGYTF

SEQ ID NO: 3613 - protein, 15 aa, Artificial Sequence
  Description of Artificial Sequence: Synthetic peptide
CASSLGRGDTDTQYF

SEQ ID NO: 3614 - protein, 15 aa, Artificial Sequence
  Description of Artificial Sequence: Synthetic peptide
CASRPGTNIPYEQYF

SEQ ID NO: 3615 - protein, 12 aa, Artificial Sequence
  Description of Artificial Sequence: Synthetic peptide
CASSENTGELFF

SEQ ID NO: 3616 - protein, 11 aa, Artificial Sequence
  Description of Artificial Sequence: Synthetic peptide
CSASLSYEQYF

SEQ ID NO: 3617 - protein, 13 aa, Artificial Sequence
  Description of Artificial Sequence: Synthetic peptide
CASSDGLWDPRRF

SEQ ID NO: 3618 - protein, 13 aa, Artificial Sequence
  Description of Artificial Sequence: Synthetic peptide
CASSVWVTYEQYF

SEQ ID NO: 3619 - protein, 13 aa, Artificial Sequence
  Description of Artificial Sequence: Synthetic peptide
CASGFQGISPLHF

SEQ ID NO: 3620 - protein, 11 aa, Artificial Sequence
  Description of Artificial Sequence: Synthetic peptide
CASSSTYEQYF

SEQ ID NO: 3621 - protein, 13 aa, Artificial Sequence
  Description of Artificial Sequence: Synthetic peptide
CASSLDSLYGYTF

SEQ ID NO: 3622 - protein, 16 aa, Artificial Sequence
  Description of Artificial Sequence: Synthetic peptide
CASSQERAATNEKLFF

SEQ ID NO: 3623 - protein, 12 aa, Artificial Sequence
  Description of Artificial Sequence: Synthetic peptide
CASSLIGGELFF

SEQ ID NO: 3624 - protein, 19 aa, Artificial Sequence
  Description of Artificial Sequence: Synthetic peptide
CASSPGVSVAGAYQETQYF

SEQ ID NO: 3625 - protein, 13 aa, Artificial Sequence
  Description of Artificial Sequence: Synthetic peptide
CASSTQGGNEQFF

SEQ ID NO: 3626 - protein, 18 aa, Artificial Sequence
  Description of Artificial Sequence: Synthetic peptide
CASSSPAGTGMFNSPLHF

SEQ ID NO: 3627 - protein, 14 aa, Artificial Sequence
  Description of Artificial Sequence: Synthetic peptide
CASRLRDRDHEQYF

SEQ ID NO: 3628 - protein, 15 aa, Artificial Sequence
  Description of Artificial Sequence: Synthetic peptide
CASSLTLYSNQPQHF

SEQ ID NO: 3629 - protein, 15 aa, Artificial Sequence
  Description of Artificial Sequence: Synthetic peptide
CASSPGLAGYNEQFF

SEQ ID NO: 3630 - protein, 13 aa, Artificial Sequence
  Description of Artificial Sequence: Synthetic peptide
CASSPTGGYEQYF

SEQ ID NO: 3631 - protein, 16 aa, Artificial Sequence
  Description of Artificial Sequence: Synthetic peptide
CSARDRAAGGKTEAFF

SEQ ID NO: 3632 - protein, 14 aa, Artificial Sequence
  Description of Artificial Sequence: Synthetic peptide
CASSSGTLRETQYF

SEQ ID NO: 3633 - protein, 13 aa, Artificial Sequence
  Description of Artificial Sequence: Synthetic peptide
CASSEGGNSPLHF

SEQ ID NO: 3634 - protein, 10 aa, Artificial Sequence
  Description of Artificial Sequence: Synthetic peptide
CSVFTGEAFF

SEQ ID NO: 3635 - protein, 18 aa, Artificial Sequence
  Description of Artificial Sequence: Synthetic peptide
CASSEAGTFSYSNQPQHF

SEQ ID NO: 3636 - protein, 13 aa, Artificial Sequence
  Description of Artificial Sequence: Synthetic peptide
CASSLRDGYEQYF

SEQ ID NO: 3637 - protein, 16 aa, Artificial Sequence
  Description of Artificial Sequence: Synthetic peptide
CAWGAKRGGIYNEQFF

SEQ ID NO: 3638 - protein, 15 aa, Artificial Sequence
  Description of Artificial Sequence: Synthetic peptide
CASQEGGGPYNEQFF

SEQ ID NO: 3639 - protein, 15 aa, Artificial Sequence
  Description of Artificial Sequence: Synthetic peptide
CASSLFDGHNTEAFF

SEQ ID NO: 3640 - protein, 17 aa, Artificial Sequence
  Description of Artificial Sequence: Synthetic peptide
CASSAQQGELRNSPLHF

SEQ ID NO: 3641 - protein, 16 aa, Artificial Sequence
  Description of Artificial Sequence: Synthetic peptide
CASSVVVGGLYNEQFF

SEQ ID NO: 3642 - protein, 15 aa, Artificial Sequence
  Description of Artificial Sequence: Synthetic peptide
CASSPYDMPHQPQHF

SEQ ID NO: 3643 - protein, 14 aa, Artificial Sequence
  Description of Artificial Sequence: Synthetic peptide
CASSQPDSGNTIYF

SEQ ID NO: 3644 - protein, 18 aa, Artificial Sequence
  Description of Artificial Sequence: Synthetic peptide
CASSLEVKGGNSYNEQFF

SEQ ID NO: 3645 - protein, 15 aa, Artificial Sequence
  Description of Artificial Sequence: Synthetic peptide
CASSRGTAGTDTQYF

SEQ ID NO: 3646 - protein, 16 aa, Artificial Sequence
  Description of Artificial Sequence: Synthetic peptide
CASSYYTGSLGGELFF

SEQ ID NO: 3647 - protein, 15 aa, Artificial Sequence
  Description of Artificial Sequence: Synthetic peptide
CASSWGGGLNTEAFF

SEQ ID NO: 3648 - protein, 15 aa, Artificial Sequence
  Description of Artificial Sequence: Synthetic peptide
CASSVEGGLNTEAFF

SEQ ID NO: 3649 - protein, 13 aa, Artificial Sequence
  Description of Artificial Sequence: Synthetic peptide
CASSGGAINEQFF

SEQ ID NO: 3650 - protein, 14 aa, Artificial Sequence
  Description of Artificial Sequence: Synthetic peptide
CAISEGGGPDTQYF

SEQ ID NO: 3651 - protein, 14 aa, Artificial Sequence
  Description of Artificial Sequence: Synthetic peptide
CATALGQGDGGYTF

SEQ ID NO: 3652 - protein, 14 aa, Artificial Sequence
  Description of Artificial Sequence: Synthetic peptide
CASSARTGTGELFF

SEQ ID NO: 3653 - protein, 17 aa, Artificial Sequence
  Description of Artificial Sequence: Synthetic peptide
CSARDLLAGGPYNEQFF

SEQ ID NO: 3654 - protein, 13 aa, Artificial Sequence
  Description of Artificial Sequence: Synthetic peptide
CASSLGTGGVHTF

SEQ ID NO: 3655 - protein, 17 aa, Artificial Sequence
  Description of Artificial Sequence: Synthetic peptide
CASRRRTSGGLSYEQYF

SEQ ID NO: 3656 - protein, 133 aa, Artificial Sequence
  Description of Artificial Sequence: Synthetic polypeptide
MMKSLRVLLVILWLQLSWVWSQQKEVEQDPGPLSVPEGAIVSLNCTYSNSAFQYFMWYRQYSRKGPELLMYTYSSGNKEDGRFTAQVDKSSKYISLFIRDSQPSDSATYLCAMGFSSNDYKLSFGAGTTVTVR

SEQ ID NO: 3657 - protein, 145 aa, Artificial Sequence
  Description of Artificial Sequence: Synthetic polypeptide
MLTASLLRAVIASICVVSSMAQKVTQAQTEISVVEKEDVTLDCVYETRDTTYYLFWYKQPPSGELVFLIRRNSFDEQNEISGRYSWNFQKSTSSFNFTITASQVVDSAVYFCALLRTSGTYKYIFGTGTRLKVLANIQNPDPAVY

SEQ ID NO: 3658 - protein, 142 aa, Artificial Sequence
  Description of Artificial Sequence: Synthetic polypeptide
METLLGLLILWLQLQWVSSKQEVTQIPAALSVPEGENLVLNCSFTDSAIYNLQWFRQDPGKGLTSLLLIQSSQREQTSGRLNASLDKSSGRSTLYIAASQPGDSATYLCAVTGSGGYNKLIFGAGTRLAVHPYIQNPDPAVY

SEQ ID NO: 3659 - protein, 144 aa, Artificial Sequence
  Description of Artificial Sequence: Synthetic polypeptide
MMKSLRVLLVILWLQLSWVWSQQKEVEQDPGPLSVPEGAIVSLNCTYSNSAFQYFMWYRQYSRKGPELLMYTYSSGNKEDGRFTAQVDKSSKYISLFIRDSQPSDSATYLCAMGFSSNDYKLSFGAGTTVTVRANIQNPDPAVY

SEQ ID NO: 3660 - protein, 139 aa, Artificial Sequence
  Description of Artificial Sequence: Synthetic polypeptide
MWGAFLLYVSMKMGGTAGQSLEQPSEVTAVEGAIVQINCTYQTSGFYGLSWYQQHDGGAPTFLSYNALDGLEETGRFSSFLSRSDSYGYLLLQELQMKDSASYFCAVRVSLGGYNKLIFGAGTRLAVHPYIQNPDPAVY

SEQ ID NO: 3661 - protein, 144 aa, Artificial Sequence
  Description of Artificial Sequence: Synthetic polypeptide
MISLRVLLVILWLQLSWVWSQRKEVEQDPGPFNVPEGATVAFNCTYSNSASQSFFWYRQDCRKEPKLLMSVYSSGNEDGRFTAQLNRASQYISLLIRDSKLSDSATYLCVVNMRDKAAGNKLTFGGGTRVLVKPNIQNPDPAVY

SEQ ID NO: 3662 - protein, 137 aa, Artificial Sequence
  Description of Artificial Sequence: Synthetic polypeptide
MRQVARVIVFLTLSTLSLAKTTQPISMDSYEGQEVNITCSHNNIATNDYITWYQQFPSQGPRFIIQGYKTKVTNEVASLFIPADRKSSTLSLPRVSLSDTAVYYCLVGREYGNKLVFGAGTILRVKSYIQNPDPAVY

SEQ ID NO: 3663 - protein, 140 aa, Artificial Sequence
  Description of Artificial Sequence: Synthetic polypeptide
METLLGLLILWLQLQWVSSKQEVTQIPAALSVPEGENLVLNCSFTDSAIYNLQWFRQDPGKGLTSLLLIQSSQREQTSGRLNASLDKSSGRSTLYIAASQPGDSATYLCAGRGGSYIPTFGRGTSLIVHPYIQNPDPAVY

SEQ ID NO: 3664 - protein, 141 aa, Artificial Sequence
  Description of Artificial Sequence: Synthetic polypeptide
MISLRVLLVILWLQLSWVWSQRKEVEQDPGPFNVPEGATVAFNCTYSNSASQSFFWYRQDCRKEPKLLMSVYSSGNEDGRFTAQLNRASQYISLLIRDSKLSDSATYLCVVNREGYSTLTFGKGTMLLVSPDIQNPDPAVY

SEQ ID NO: 3665 - protein, 140 aa, Artificial Sequence
  Description of Artificial Sequence: Synthetic polypeptide
METLLGLLILWLQLQWVSSKQEVTQIPAALSVPEGENLVLNCSFTDSAIYNLQWFRQDPGKGLTSLLLIQSSQREQTSGRLNASLDKSSGRSTLYIAASQPGDSATYLCAVRGNNARLMFGDGTQLVVKPNIQNPDPAVY

SEQ ID NO: 3666 - protein, 133 aa, Artificial Sequence
  Description of Artificial Sequence: Synthetic polypeptide
METLLGLLILWLQLQWVSSKQEVTQIPAALSVPEGENLVLNCSFTDSAIYNLQWFRQDPGKGLTSLLLIQSSQREQTSGRLNASLDKSSGRSTLYIAASQPGDSATYLCAVTDSNYQLIWGAGTKLIIKPDIQ

SEQ ID NO: 3667 - protein, 142 aa, Artificial Sequence
  Description of Artificial Sequence: Synthetic polypeptide
METVLQVLLGILGFQAAWVSSQELEQSPQSLIVQEGKNLTINCTSSKTLYGLYWYKQKYGEGLIFLMMLQKGGEEKSHEKITAKLDEKKQQSSLHITASQPSHAGIYLCGALTTSGTYKYIFGTGTRLKVLANIQNPDPAVY

SEQ ID NO: 3668 - protein, 149 aa, Artificial Sequence
  Description of Artificial Sequence: Synthetic polypeptide
MAMLLGASVLILWLQPDWVNSQQKNDDQQVKQNSPSLSVQEGRISILNCDYTNSMFDYFLWYKKYPAEGPTFLISISSIKDKNEDGRFTVFLNKSAKHLSLHIVPSQPGDSAVYFCAASVGSGNTPLVFGKGTRLSVIANIQNPDPAVY

SEQ ID NO: 3669 - protein, 139 aa, Artificial Sequence
  Description of Artificial Sequence: Synthetic polypeptide
METLLGLLILWLQLQWVSSKQEVTQIPAALSVPEGENLVLNCSFTDSAIYNLQWFRQDPGKGLTSLLLIQSSQREQTSGRLNASLDKSSGRSTLYIAASQPGDSATYLCAAKGAQKLVFGQGTRLTINPNIQNPDPAVY

SEQ ID NO: 3670 - protein, 143 aa, Artificial Sequence
  Description of Artificial Sequence: Synthetic polypeptide
METLLGLLILWLQLQWVSSKQEVTQIPAALSVPEGENLVLNCSFTDSAIYNLQWFRQDPGKGLTSLLLIQSSQREQTSGRLNASLDKSSGRSTLYIAASQPGDSATYLCAVPNYGGSQGNLIFGKGTKLSVKPNIQNPDPAVY

SEQ ID NO: 3671 - protein, 142 aa, Artificial Sequence
  Description of Artificial Sequence: Synthetic polypeptide
METLLGLLILWLQLQWVSSKQEVTQIPAALSVPEGENLVLNCSFTDSAIYNLQWFRQDPGKGLTSLLLIQSSQREQTSGRLNASLDKSSGRSTLYIAASQPGDSATYLCAVLGASGTYKYIFGTGTRLKVLANIQNPDPAVY

SEQ ID NO: 3672 - protein, 148 aa, Artificial Sequence
  Description of Artificial Sequence: Synthetic polypeptide
MAMLLGASVLILWLQPDWVNSQQKNDDQQVKQNSPSLSVQEGRISILNCDYTNSMFDYFLWYKKYPAEGPTFLISISSIKDKNEDGRFTVFLNKSAKHLSLHIVPSQPGDSAVYFCAASSGTGNQFYFGTGTSLTVIPNIQNPDPAVY

SEQ ID NO: 3673 - protein, 142 aa, Artificial Sequence
  Description of Artificial Sequence: Synthetic polypeptide
METLLGLLILWLQLQWVSSKQEVTQIPAALSVPEGENLVLNCSFTDSAIYNLQWFRQDPGKGLTSLLLIQSSQREQTSGRLNASLDKSSGRSTLYIAASQPGDSATYLCAVIPTSGTYKYIFGTGTRLKVLANIQNPDPAVY

SEQ ID NO: 3674 - protein, 141 aa, Artificial Sequence
  Description of Artificial Sequence: Synthetic polypeptide
METLLGLLILWLQLQWVSSKQEVTQIPAALSVPEGENLVLNCSFTDSAIYNLQWFRQDPGKGLTSLLLIQSSQREQTSGRLNASLDKSSGRSTLYIAASQPGDSATYLCAAMNSGYSTLTFGKGTMLLVSPDIQNPDPAVY

SEQ ID NO: 3675 - protein, 137 aa, Artificial Sequence
  Description of Artificial Sequence: Synthetic polypeptide
MKLVTSITVLLSLGIMGDAKTTQPNSMESNEEEPVHLPCNHSTISGTDYIHWYRQLPSQGPEYVIHGLTSNVNNRMASLAIAEDRKSSTLILHRATLRDAAVYYCILNVYTGNQFYFGTGTSLTVIPNIQNPDPAVY

SEQ ID NO: 3676 - protein, 137 aa, Artificial Sequence
  Description of Artificial Sequence: Synthetic polypeptide
METLLGVSLVILWLQLARVNSQQGEEDPQALSIQEGENATMNCSYKTSINNLQWYRQNSGRGLVHLILIRSNEREKHSGRLRVTLDTSKKSSSLLITASRAADTASYFCATDAGLIFGTGTRLQVFPNIQNPDPAVY

SEQ ID NO: 3677 - protein, 142 aa, Artificial Sequence
  Description of Artificial Sequence: Synthetic polypeptide
METLLGLLILWLQLQWVSSKQEVTQIPAALSVPEGENLVLNCSFTDSAIYNLQWFRQDPGKGLTSLLLIQSSQREQTSGRLNASLDKSSGRSTLYIAASQPGDSATYLCAATSPNYGQNFVFGPGTRLSVLPYIQNPDPAVY

SEQ ID NO: 3678 - protein, 150 aa, Artificial Sequence
  Description of Artificial Sequence: Synthetic polypeptide
MAMLLGASVLILWLQPDWVNSQQKNDDQQVKQNSPSLSVQEGRISILNCDYTNSMFDYFLWYKKYPAEGPTFLISISSIKDKNEDGRFTVFLNKSAKHLSLHIVPSQPGDSAVYFCAALTFSGGYNKLIFGAGTRLAVHPYIQNPDPAVY

SEQ ID NO: 3679 - protein, 140 aa, Artificial Sequence
  Description of Artificial Sequence: Synthetic polypeptide
MTSIRAVFIFLWLQLDLVNGENVEQHPSTLSVQEGDSAVIKCTYSDSASNYFPWYKQELGKGPQLIIDIRSNVGEKKDQRIAVTLNKTAKHFSLHITETQPEDSAVYFCAASIPGNQFYFGTGTSLTVIPNIQNPDPAVY

SEQ ID NO: 3680 - protein, 143 aa, Artificial Sequence
  Description of Artificial Sequence: Synthetic polypeptide
MISLRVLLVILWLQLSWVWSQRKEVEQDPGPFNVPEGATVAFNCTYSNSASQSFFWYRQDCRKEPKLLMSVYSSGNEDGRFTAQLNRASQYISLLIRDSKLSDSATYLCVVNKLTGGGNKLTFGTGTQLKVELNIQNPDPAVY

SEQ ID NO: 3681 - protein, 148 aa, Artificial Sequence
  Description of Artificial Sequence: Synthetic polypeptide
MAMLLGASVLILWLQPDWVNSQQKNDDQQVKQNSPSLSVQEGRISILNCDYTNSMFDYFLWYKKYPAEGPTFLISISSIKDKNEDGRFTVFLNKSAKHLSLHIVPSQPGDSAVYFCAASGGAGNMLTFGGGTRLMVKPHIQNPDPAVY

SEQ ID NO: 3682 - protein, 139 aa, Artificial Sequence
  Description of Artificial Sequence: Synthetic polypeptide
METLLGLLILWLQLQWVSSKQEVTQIPAALSVPEGENLVLNCSFTDSAIYNLQWFRQDPGKGLTSLLLIQSSQREQTSGRLNASLDKSSGRSTLYIAASQPGDSATYLCAVEYGNKLVFGAGTILRVKSYIQNPDPAVY

SEQ ID NO: 3683 - protein, 139 aa, Artificial Sequence
  Description of Artificial Sequence: Synthetic polypeptide
MKKLLAMILWLQLDRLSGELKVEQNPLFLSMQEGKNYTIYCNYSTTSDRLYWYRQDPGKSLESLFVLLSNGAVKQEGRLMASLDTKARLSTLHITAAVHDLSATYFCAVDLNSGYALNFGKGTSLLVTPHIQNPDPAVY

SEQ ID NO: 3684 - protein, 153 aa, Artificial Sequence
  Description of Artificial Sequence: Synthetic polypeptide
METLLGVSLVILWLQLARVNSQQGEEDPQALSIQEGENATMNCSYKTSINNLQWYRQNSGRGLVHLILIRSNEREKHSGRLRVTLDTSKKSSSLLITASRAADTASYFCATDAYGGSNYKLTFGKGTLLTVNPNIQNPDPAVYQLRDSEVAVF

SEQ ID NO: 3685 - protein, 140 aa, Artificial Sequence
  Description of Artificial Sequence: Synthetic polypeptide
MRLVARVTVFLTFGTIIDAKTTQPPSMDCAEGRAANLPCNHSTISGNEYVYWYRQIHSQGPQYIIHGLKNNETNEMASLIITEDRKSSTLILPHATLRDTAVYYCIGGALYGGSQGNLIFGKGTKLSVKPNIQNPDPAVY

SEQ ID NO: 3686 - protein, 143 aa, Artificial Sequence
  Description of Artificial Sequence: Synthetic polypeptide
MLLLLVPAFQVIFTLGGTRAQSVTQLDSQVPVFEEAPVELRCNYSSSVSVYLFWYVQYPNQGLQLLLKYLSGSTLVKGINGFEAEFNKSQTSFHLRKPSVHISDTAEYFCAVSLKTSYDKVIFGPGTSLSVIPNIQNPDPAVY

SEQ ID NO: 3687 - protein, 146 aa, Artificial Sequence
  Description of Artificial Sequence: Synthetic polypeptide
MLTASLLRAVIASICVVSSMAQKVTQAQTEISVVEKEDVTLDCVYETRDTTYYLFWYKQPPSGELVFLIRRNSFDEQNEISGRYSWNFQKSTSSFNFTITASQVVDSAVYFCALSILTGGGNKLTFGTGTQLKVELNIQNPDPAVY

SEQ ID NO: 3688 - protein, 144 aa, Artificial Sequence
  Description of Artificial Sequence: Synthetic polypeptide
MLLLLVPVLEVIFTLGGTRAQSVTQLGSHVSVSEGALVLLRCNYSSSVPPYLFWYVQYPNQGLQLLLKYTSAATLVKGINGFEAEFKKSETSFHLTKPSAHMSDAAEYFCAVSDYGGSQGNLIFGKGTKLSVKPNIQNPDPAVY

SEQ ID NO: 3689 - protein, 142 aa, Artificial Sequence
  Description of Artificial Sequence: Synthetic polypeptide
MISLRVLLVILWLQLSWVWSQRKEVEQDPGPFNVPEGATVAFNCTYSNSASQSFFWYRQDCRKEPKLLMSVYSSGNEDGRFTAQLNRASQYISLLIRDSKLSDSATYLCVVNTEEYGNKLVFGAGTILRVKSYIQNPDPAVY

SEQ ID NO: 3690 - protein, 148 aa, Artificial Sequence
  Description of Artificial Sequence: Synthetic polypeptide
MAMLLGASVLILWLQPDWVNSQQKNDDQQVKQNSPSLSVQEGRISILNCDYTNSMFDYFLWYKKYPAEGPTFLISISSIKDKNEDGRFTVFLNKSAKHLSLHIVPSQPGDSAVYFCAASGESQGNLIFGKGTKLSVKPNIQNPDPAVY

SEQ ID NO: 3691 - protein, 142 aa, Artificial Sequence
  Description of Artificial Sequence: Synthetic polypeptide
MAGIRALFMYLWLQLDWVSRGESVGLHLPTLSVQEGDNSIINCAYSNSASDYFIWYKQESGKGPQFIIDIRSNMDKRQGQRVTVLLNKTVKHLSLQIAATQPGDSAVYFCAEISSNDYKLSFGAGTTVTVRANIQNPDPAVY

SEQ ID NO: 3692 - protein, 143 aa, Artificial Sequence
  Description of Artificial Sequence: Synthetic polypeptide
MKKHLTTFLVILWLYFYRGNGKNQVEQSPQSLIILEGKNCTLQCNYTVSPFSNLRWYKQDTGRGPVSLTIMTFSENTKSNGRYTATLDADTKQSSLHITASQLSDSASYICVVSGAGGFKTIFGAGTRLFVKANIQNPDPAVY

SEQ ID NO: 3693 - protein, 146 aa, Artificial Sequence
  Description of Artificial Sequence: Synthetic polypeptide
MLTASLLRAVIASICVVSSMAQKVTQAQTEISVVEKEDVTLDCVYETRDTTYYLFWYKQPPSGELVFLIRRNSFDEQNEISGRYSWNFQKSTSSFNFTITASQVVDSAVYFCALSEANTNAGKSTFGDGTTLTVKPNIQNPDPAVY

SEQ ID NO: 3694 - protein, 140 aa, Artificial Sequence
  Description of Artificial Sequence: Synthetic polypeptide
MNYSPGLVSLILLLLGRTRGNSVTQMEGPVTLSEEAFLTINCTYTATGYPSLFWYVQYPGEGLQLLLKATKADDKGSNKGFEATYRKETTSFHLEKGSVQVSDSAVYFCALRSNDYKLSFGAGTTVTVRANIQNPDPAVY

SEQ ID NO: 3695 - protein, 143 aa, Artificial Sequence
  Description of Artificial Sequence: Synthetic polypeptide
MKSLRVLLVILWLQLSWVWSQQKEVEQNSGPLSVPEGAIASLNCTYSDRGSQSFFWYRQYSGKSPELIMFIYSNGDKEDGRFTAQLNKASQYVSLLIRDSQPSDSATYLCAMGFSSNDYKLSFGAGTTVTVRANIQNPDPAVY

SEQ ID NO: 3696 - protein, 141 aa, Artificial Sequence
  Description of Artificial Sequence: Synthetic polypeptide
METLLKVLSGTLLWQLTWVRSQQPVQSPQAVILREGEDAVINCSSSKALYSVHWYRQKHGEAPVFLMILLKGGEQKGHEKISASFNEKKQQSSLYLTASQLSYSGTYFCGTEETSGSRLTFGEGTQLTVNPDIQNPDPAVY

SEQ ID NO: 3697 - protein, 137 aa, Artificial Sequence
  Description of Artificial Sequence: Synthetic polypeptide
MLLLLIPVLGMIFALRDARAQSVSQHNHHVILSEAASLELGCNYSYGGTVNLFWYVQYPGQHLQLLLKYFSGDPLVKGIKGFEAEFIKSKFSFNLRKPSVQWSDTAEYFCAVNGMRFGAGTRLTVKPNIQNPDPAVY

SEQ ID NO: 3698 - protein, 140 aa, Artificial Sequence
  Description of Artificial Sequence: Synthetic polypeptide
MTSIRAVFIFLWLQLDLVNGENVEQHPSTLSVQEGDSAVIKCTYSDSASNYFPWYKQELGKGPQLIIDIRSNVGEKKDQRIAVTLNKTAKHFSLHITETQPEDSAVYFCAALTGGFKTIFGAGTRLFVKANIQNPDPAVY

SEQ ID NO: 3699 - protein, 140 aa, Artificial Sequence
  Description of Artificial Sequence: Synthetic polypeptide
MISLRVLLVILWLQLSWVWSQRKEVEQDPGPFNVPEGATVAFNCTYSNSASQSFFWYRQDCRKEPKLLMSVYSSGNEDGRFTAQLNRASQYISLLIRDSKLSDSATYLCVVNRGNTPLVFGKGTRLSVIANIQNPDPAVY

SEQ ID NO: 3700 - protein, 158 aa, Artificial Sequence
  Description of Artificial Sequence: Synthetic polypeptide
MLTASLLRAVIASICVVSSMAQKVTQAQTEISVVEKEDVTLDCVYETRDTTYYLFWYKQPPSGELVFLIRRNSFDEQNEISGRYSWNFQKSTSSFNFTITASQVVDSAVYFCALLRTSGTYKYIFGTGTRLKVLANIQNPDPAVYQLRDSKSSDKSVC

SEQ ID NO: 3701 - protein, 139 aa, Artificial Sequence
  Description of Artificial Sequence: Synthetic polypeptide
METLLGLLILWLQLQWVSSKQEVTQIPAALSVPEGENLVLNCSFTDSAIYNLQWFRQDPGKGLTSLLLIQSSQREQTSGRLNASLDKSSGRSTLYIAASQPGDSATYLCAVRPGNDMRFGAGTRLTVKPNIQNPDPAVY

SEQ ID NO: 3702 - protein, 137 aa, Artificial Sequence
  Description of Artificial Sequence: Synthetic polypeptide
MKLVTSITVLLSLGIMGDAKTTQPNSMESNEEEPVHLPCNHSTISGTDYIHWYRQLPSQGPEYVIHGLTSNVNNRMASLAIAEDRKSSTLILHRATLRDAAVYYCILSRGATNKLIFGTGTLLAVQPNIQNPDPAVY

SEQ ID NO: 3703 - protein, 144 aa, Artificial Sequence
  Description of Artificial Sequence: Synthetic polypeptide
MLTASLLRAVIASICVVSSMAQKVTQAQTEISVVEKEDVTLDCVYETRDTTYYLFWYKQPPSGELVFLIRRNSFDEQNEISGRYSWNFQKSTSSFNFTITASQVVDSAVYFCALSEAIGTALIFGKGTTLSVSSNIQNPDPAVY

SEQ ID NO: 3704 - protein, 141 aa, Artificial Sequence
  Description of Artificial Sequence: Synthetic polypeptide
MKSLRVLLVILWLQLSWVWSQQKEVEQNSGPLSVPEGAIASLNCTYSDRGSQSFFWYRQYSGKSPELIMFIYSNGDKEDGRFTAQLNKASQYVSLLIRDSQPSDSATYLCAVTGGYQKVTFGIGTKLQVIPNIQNPDPAVY

SEQ ID NO: 3705 - protein, 146 aa, Artificial Sequence
  Description of Artificial Sequence: Synthetic polypeptide
MAMLLGASVLILWLQPDWVNSQQKNDDQQVKQNSPSLSVQEGRISILNCDYTNSMFDYFLWYKKYPAEGPTFLISISSIKDKNEDGRFTVFLNKSAKHLSLHIVPSQPGDSAVYFCAGGGAQKLVFGQGTRLTINPNIQNPDPAVY

SEQ ID NO: 3706 - protein, 146 aa, Artificial Sequence
  Description of Artificial Sequence: Synthetic polypeptide
MLTASLLRAVIASICVVSSMAQKVTQAQTEISVVEKEDVTLDCVYETRDTTYYLFWYKQPPSGELVFLIRRNSFDEQNEISGRYSWNFQKSTSSFNFTITASQVVDSAVYFCALSGSGGSNYKLTFGKGTLLTVNPNIQNPDPAVY

SEQ ID NO: 3707 - protein, 151 aa, Artificial Sequence
  Description of Artificial Sequence: Synthetic polypeptide
MDKILGASFLVLWLQLCWVSGQQKEKSDQQQVKQSPQSLIVQKGGISIINCAYENTAFDYFPWYQQFPGKGPALLIAIRPDVSEKKEGRFTISFNKSAKQFSLHIMDSQPGDSATYFCAASIETGANNLFFGTGTRLTVIPYIQNPDPAVY

SEQ ID NO: 3708 - protein, 145 aa, Artificial Sequence
  Description of Artificial Sequence: Synthetic polypeptide
MLLLLVPAFQVIFTLGGTRAQSVTQLDSQVPVFEEAPVELRCNYSSSVSVYLFWYVQYPNQGLQLLLKYLSGSTLVKGINGFEAEFNKSQTSFHLRKPSVHISDTAEYFCAVLTLYGGATNKLIFGTGTLLAVQPNIQNPDPAVY

SEQ ID NO: 3709 - protein, 139 aa, Artificial Sequence
  Description of Artificial Sequence: Synthetic polypeptide
MWGAFLLYVSMKMGGTAGQSLEQPSEVTAVEGAIVQINCTYQTSGFYGLSWYQQHDGGAPTFLSYNALDGLEETGRFSSFLSRSDSYGYLLLQELQMKDSASYFCAVPPYSGGYQKVTFGIGTKLQVIPNIQNPDPAVY

SEQ ID NO: 3710 - protein, 142 aa, Artificial Sequence
  Description of Artificial Sequence: Synthetic polypeptide
METLLGLLILWLQLQWVSSKQEVTQIPAALSVPEGENLVLNCSFTDSAIYNLQWFRQDPGKGLTSLLLIQSSQREQTSGRLNASLDKSSGRSTLYIAASQPGDSATYLCAPLFTGTASKLTFGTGTRLQVTLDIQNPDPAVY

SEQ ID NO: 3711 - protein, 151 aa, Artificial Sequence
  Description of Artificial Sequence: Synthetic polypeptide
MAMLLGASVLILWLQPDWVNSQQKNDDQQVKQNSPSLSVQEGRISILNCDYTNSMFDYFLWYKKYPAEGPTFLISISSIKDKNEDGRFTVFLNKSAKHLSLHIVPSQPGDSAVYFCAASDPGYSSASKIIFGSGTRLSIRPNIQNPDPAVY

SEQ ID NO: 3712 - protein, 141 aa, Artificial Sequence
  Description of Artificial Sequence: Synthetic polypeptide
METLLGVSLVILWLQLARVNSQQGEEDPQALSIQEGENATMNCSYKTSINNLQWYRQNSGRGLVHLILIRSNEREKHSGRLRVTLDTSKKSSSLLITASRAADTASYFCATDGNAGNMLTFGGGTRLMVKPHIQNPDPAVY

SEQ ID NO: 3713 - protein, 137 aa, Artificial Sequence
  Description of Artificial Sequence: Synthetic polypeptide
MKLVTSITVLLSLGIMGDAKTTQPNSMESNEEEPVHLPCNHSTISGTDYIHWYRQLPSQGPEYVIHGLTSNVNNRMASLAIAEDRKSSTLILHRATLRDAAVYYCIRQMDSSYKLIFGSGTRLLVRPDIQNPDPAVY

SEQ ID NO: 3714 - protein, 145 aa, Artificial Sequence
  Description of Artificial Sequence: Synthetic polypeptide
MAMLLGASVLILWLQPDWVNSQQKNDDQQVKQNSPSLSVQEGRISILNCDYTNSMFDYFLWYKKYPAEGPTFLISISSIKDKNEDGRFTVFLNKSAKHLSLHIVPSQPGDSAVYFCAASDGQLTFGSGTQLTVLPDIQNPDPAVY

SEQ ID NO: 3715 - protein, 141 aa, Artificial Sequence
  Description of Artificial Sequence: Synthetic polypeptide
METLLGLLILWLQLQWVSSKQEVTQIPAALSVPEGENLVLNCSFTDSAIYNLQWFRQDPGKGLTSLLLIQSSQREQTSGRLNASLDKSSGRSTLYIAASQPGDSATYLCAVIQFKDYKLSFGAGTTVTVRANIQNPDPAVY

SEQ ID NO: 3716 - protein, 144 aa, Artificial Sequence
  Description of Artificial Sequence: Synthetic polypeptide
MMKSLRVLLVILWLQLSWVWSQQKEVEQDPGPLSVPEGAIVSLNCTYSNSAFQYFMWYRQYSRKGPELLMYTYSSGNKEDGRFTAQVDKSSKYISLFIRDSQPSDSATYLCAMSRYSSASKIIFGSGTRLSIRPNIQNPDPAVY

SEQ ID NO: 3717 - protein, 133 aa, Artificial Sequence
  Description of Artificial Sequence: Synthetic polypeptide
MVLKFSVSILWIQLAWVSTQLLEQSPQFLSIQEGENLTVYCNSSSVFSSLQWYRQEPGEGPVLLVTVVTGGEVKKLKRLTFQFGDARKDSSLHITAAQPGDTGLYLCAGDSWDSNYQLIWGAGTKLIIKPDIQ

SEQ ID NO: 3718 - protein, 144 aa, Artificial Sequence
  Description of Artificial Sequence: Synthetic polypeptide
MTSIRAVFIFLWLQLDLVNGENVEQHPSTLSVQEGDSAVIKCTYSDSASNYFPWYKQELGKGPQLIIDIRSNVGEKKDQRIAVTLNKTAKHFSLHITETQPEDSAVYFCAAPRFLTGSARQLTFGSGTQLTVLPDIQNPDPAVY

SEQ ID NO: 3719 - protein, 137 aa, Artificial Sequence
  Description of Artificial Sequence: Synthetic polypeptide
MRLVARVTVFLTFGTIIDAKTTQPPSMDCAEGRAANLPCNHSTISGNEYVYWYRQIHSQGPQYIIHGLKNNETNEMASLIITEDRKSSTLILPHATLRDTAVYYCIVRFYNTDKLIFGTGTRLQVFPNIQNPDPAVY

SEQ ID NO: 3720 - protein, 145 aa, Artificial Sequence
  Description of Artificial Sequence: Synthetic polypeptide
MKKHLTTFLVILWLYFYRGNGKNQVEQSPQSLIILEGKNCTLQCNYTVSPFSNLRWYKQDTGRGPVSLTIMTFSENTKSNGRYTATLDADTKQSSLHITASQLSDSASYICVALGFSGGYNKLIFGAGTRLAVHPYIQNPDPAVY

SEQ ID NO: 3721 - protein, 143 aa, Artificial Sequence
  Description of Artificial Sequence: Synthetic polypeptide
MISLRVLLVILWLQLSWVWSQQKEVEQNSGPLSVPEGAIASLNCTYSDRGSQSFFWYRQYSGKSPELIMFIYSNGDKEDGRFTAQLNKASQYVSLLIRDSQPSDSATYLCAMGFSSNDYKLSFGAGTTVTVRANIQNPDPAVY

SEQ ID NO: 3722 - protein, 140 aa, Artificial Sequence
  Description of Artificial Sequence: Synthetic polypeptide
MNYSPGLVSLILLLLGRTRGDSVTQMEGPVTLSEEAFLTINCTYTATGYPSLFWYVQYPGEGLQLLLKATKADDKGSNKGFEATYRKETTSFHLEKGSVQVSDSAVYFCAPYNQGGKLIFGQGTELSVKPNIQNPDPAVY

SEQ ID NO: 3723 - protein, 145 aa, Artificial Sequence
  Description of Artificial Sequence: Synthetic polypeptide
MEKNPLAAPLLILWFHLDCVSSILNVEQSPQSLHVQEGDSTNFTCSFPSSNFYALHWYRWETAKSPEALFVMTLNGDEKKKGRISATLNTKEGYSYLYIKGSQPEDSATYLCALTRGGGADGLTFGKGTHLIIQPYIQNPDPAVY

SEQ ID NO: 3724 - protein, 142 aa, Artificial Sequence
  Description of Artificial Sequence: Synthetic polypeptide
MTSIRAVFIFLWLQLDLVNGENVEQHPSTLSVQEGDSAVIKCTYSDSASNYFPWYKQELGKGPQLIIDIRSNVGEKKDQRIAVTLNKTAKHFSLHITETQPEDSAVYFCAAVTYSSASKIIFGSGTRLSIRPNIQNPDPAVY

SEQ ID NO: 3725 - protein, 140 aa, Artificial Sequence
  Description of Artificial Sequence: Synthetic polypeptide
MEKMLECAFIVLWLQLGWLSGEDQVTQSPEALRLQEGESSSLNCSYTVSGLRGLFWYRQDPGKGPEFLFTLYSAGEEKEKERLKATLTKKESFLHITAPKPEDSATYLCAVQAGDYKLSFGAGTTVTVRANIQNPDPAVY

SEQ ID NO: 3726 - protein, 144 aa, Artificial Sequence
  Description of Artificial Sequence: Synthetic polypeptide
MLLLLVPVLEVIFTLGGTRAQSVTQLGSHVSVSEGALVLLRCNYSSSVPPYLFWYVQYPNQGLQLLLKYTSAATLVKGINGFEAEFKKSETSFHLTKPSAHMSDAAEYFCAVSRYGGSQGNLIFGKGTKLSVKPNIQNPDPAVY

SEQ ID NO: 3727 - protein, 136 aa, Artificial Sequence
  Description of Artificial Sequence: Synthetic polypeptide
MWGVFLLYVSMKMGGTTGQNIDQPTEMTATEGAIVQINCTYQTSGFNGLFWYQQHAGEAPTFLSYNVLDGLEEKGRFSSFLSRSKGYSYLLLKELQMKDSASYLCAVRDGGARLMFGDGTQLVVKPNIQNPDPAVY

SEQ ID NO: 3728 - protein, 143 aa, Artificial Sequence
  Description of Artificial Sequence: Synthetic polypeptide
MISLRVLLVILWLQLSWVWSQRKEVEQDPGPFNVPEGATVAFNCTYSNSASQSFFWYRQDCRKEPKLLMSVYSSGNEDGRFTAQLNRASQYISLLIRDSKLSDSATYLCVVNGESGGYQKVTFGIGIKLQVIPNIQNPDPAVY

SEQ ID NO: 3729 - protein, 143 aa, Artificial Sequence
  Description of Artificial Sequence: Synthetic polypeptide
MISLRVLLVILWLQLSWVWSQRKEVEQDPGPFNVPEGATVAFNCTYSNSASQSFFWYRQDCRKEPKLLMSVYSSGNEDGRFTAQLNRASQYISLLIRDSKLSDSATYLCVVISFSGGYNKLIFGAGTRLAVHPYIQNPDPAVY

SEQ ID NO: 3730 - protein, 140 aa, Artificial Sequence
  Description of Artificial Sequence: Synthetic polypeptide
MASAPISMLAMLFTLSGLRAQSVAQPEDQVNVAEGNPLTVKCTYSVSGNPYLFWYVQYPNRGLQFLLKYITGDNLVKGSYGFEAEFNKSQTSFHLKKPSALVSDSALYFCAVRDIGITIFGAGTRLFVKANIQNPDPAVY

SEQ ID NO: 3731 - protein, 139 aa, Artificial Sequence
  Description of Artificial Sequence: Synthetic polypeptide
MRLVARVTVFLTFGTIIDAKTTQPTSMDCAEGRAANLPCNHSTISGNEYVYWYRQIHSQGPQYIIHGLKNNETNEMASLIITEDRKSSTLILPHATLRDTAVYYCIVRNYGGSQGNLIFGKGTKLSVKPNIQNPDPAVY

SEQ ID NO: 3732 - protein, 142 aa, Artificial Sequence
  Description of Artificial Sequence: Synthetic polypeptide
METLLGLLILWLQLQWVSSKQEVTQIPAALSVPEGENLVLNCSFTDSAIYNLQWFRQDPGKGLTSLLLIQSSQREQTSGRLNASLDKSSGRSTLYIAASQPGDSATYLCAVRPMEYGNKLVFGAGTILRVKSYIQNPDPAVY

SEQ ID NO: 3733 - protein, 141 aa, Artificial Sequence
  Description of Artificial Sequence: Synthetic polypeptide
MAGIRALFMYLWLQLDWVSRGESVGLHLPTLSVQEGDNSIINCAYSNSASDYFIWYKQESGKGPQFIIDIRSNMDKRQGQRVTVLLNKTVKHLSLQIAATQPGDSAVYFCAENALGNKLVFGAGTILRVKSYIQNPDPAVY

SEQ ID NO: 3734 - protein, 150 aa, Artificial Sequence
  Description of Artificial Sequence: Synthetic polypeptide
MAMLLGASVLILWLQPDWVNSQQKNDDQQVKQNSPSLSVQEGRISILNCDYTNSMFDYFLWYKKYPAEGPTFLISISSIKDKNEDGRFTVFLNKSAKHLSLHIVPSQPGDSAVYFCAAPYSGAGSYQLTFGKGTKTLGHTKYPEPPCRVP

SEQ ID NO: 3735 - protein, 141 aa, Artificial Sequence
  Description of Artificial Sequence: Synthetic polypeptide
MAGIRALFMYLWLQLDWVSRGESVGLHLPTLSVQEGDNSIINCAYSNSASDYFIWYKQESGKGPQFIIDIRSNMDKRQGQRVTVLLNKTVKHLSLQIAATQPGDSAVYFCAESAAGNKLTFGGGTRVLVKPNIQNPDPAVY

SEQ ID NO: 3736 - protein, 145 aa, Artificial Sequence
  Description of Artificial Sequence: Synthetic polypeptide
MACPGFLWALVISTCLEFSMAQTVTQSQPEMSVQEAETVTLSCTYDTSESDYYLFWYKQPPSRQMILVIRQEAYKQQNATENRFSVNFQKAAKSFSLKISDSQLGDAAMYFCASITQGGSEKLVFGKGTKLTVNPYIQNPDPAVY

SEQ ID NO: 3737 - protein, 143 aa, Artificial Sequence
  Description of Artificial Sequence: Synthetic polypeptide
METLLGVSLVILWLQLARVNSQQGEEDPQALSIQEGENATMNCSYKTSINNLQWYRQNSGRGLVHLILIRSNEREKHSGRLRVTLDTSKKSSSLLITASRAADTASYFCATDHYGGATNKLIFGTGTLLAVQPNIQNPDPAVY

SEQ ID NO: 3738 - protein, 139 aa, Artificial Sequence
  Description of Artificial Sequence: Synthetic polypeptide
METLLGLLILWLQLQWVSSKQEVTQIPAALSVPEGENLVLNCSFTDSAIYNLQWFRQDPGKGLTSLLLIQSSQREQTSGRLNASLDKSSGRSTLYIAASQPGDSATYLCAVRIGNMLTFGGGTRLMVKPHIQNPDPAVY

SEQ ID NO: 3739 - protein, 143 aa, Artificial Sequence
  Description of Artificial Sequence: Synthetic polypeptide
MISLRVLLVILWLQLSWVWSQRKEVEQDPGPFNVPEGATVAFNCTYSNSASQSFFWYRQDCRKEPKLLMSVYSSGNEDGRFTAQLNRASQYISLLIRDSKLSDSATYLCVVIDPNTGGFKTIFGAGTRLFVKANIQNPDPAVY

SEQ ID NO: 3740 - protein, 146 aa, Artificial Sequence
  Description of Artificial Sequence: Synthetic polypeptide
MLTASLLRAVIASICVVSSMAQKVTQAQTEISVVEKEDVTLDCVYETRDTTYYLFWYKQPPSGELVFLIRRNSFDEQNEISGRYSWNFQKSTSSFNFTITASQVVDSAVYFCALSEGGGATNKLIFGTGTLLAVQPNIQNPDPAVY

SEQ ID NO: 3741 - protein, 141 aa, Artificial Sequence
  Description of Artificial Sequence: Synthetic polypeptide
MLLELIPLLGIHFVLRTARAQSVTQPDIHITVSEGASLELRCNYSYGATPYLFWYVQSPGQGLQLLLKYFSGDTLVQGIKGFEAEFKRSQSSFNLRKPSVHWSDAAEYFCAVGGGSYIPTFGRGTSLIVHPYIQNPDPAVY

SEQ ID NO: 3742 - protein, 141 aa, Artificial Sequence
  Description of Artificial Sequence: Synthetic polypeptide
MKTFAGFSFLFLWLQLDCMSRGEDVEQSLFLSVREGDSSVINCTYTDSSSTYLYWYKQEPGAGLQLLTYIFSNMDMKQDQRLTVLLNKKDKHLSLRIADTQTGDSAIYFCAEKGNTGKLIFGQGTTLQVKPDIQNPDPAVY

SEQ ID NO: 3743 - protein, 148 aa, Artificial Sequence
  Description of Artificial Sequence: Synthetic polypeptide
MLTASLLRAVIASICVVSSMAQKVTQAQTEISVVEKEDVTLDCVYETRDTTYYLFWYKQPPSGELVFLIRRNSFDEQNEISGRYSWNFQKSTSSFNFTITASQVVDSAVYFCALSEAGAYNQGGKLIFGQGTELSVKPNIQNPDPAVY

SEQ ID NO: 3744 - protein, 143 aa, Artificial Sequence
  Description of Artificial Sequence: Synthetic polypeptide
MKSLRVLLVILWLQLSWVWSQQKEVEQNSGPLSVPEGAIASLNCTYSDRGSQSFFWYRQYSGKSPELIMFIYSNGDKEDGRFTAQLNKASQYVSLLIRDSQPSDSATYLCAMGFSSNDYKLSFGAGTTVTVRSNIQNPDPAVY

SEQ ID NO: 3745 - protein, 137 aa, Artificial Sequence
  Description of Artificial Sequence: Synthetic polypeptide
MWGVFLLYVSMKMGGTTGQNIDQPTEMTATEGAIVQINCTYQTSGFNGLFWYQQHAGEAPTFLSYNVLDGLEEKGRFSSFLSRSKGYSYLLLKELQMKDSASYLCAVGGQAGTALIFGKGTTLSVSSNIQNPDPAVY

SEQ ID NO: 3746 - protein, 131 aa, Artificial Sequence
  Description of Artificial Sequence: Synthetic polypeptide
METLLGLLILWLQLQWVSSKQEVTQIPAALSVPEGENLVLNCSFTDSAIYNLQWFRQDPGKGLTSLLLIQSSQREQTSGRLNASLDKSSGRSTLYIAASQPGDSATYLCAVTASTGGFKTIFGAGTRLFVK

SEQ ID NO: 3747 - protein, 141 aa, Artificial Sequence
  Description of Artificial Sequence: Synthetic polypeptide
MLLLLVPAFQVIFTLGGTRAQSVTQLDSQVPVFEEAPVELRCNYSSSVSVYLFWYVQYPNQGLQLLLKYLSGSTLVKGINGFEAEFNKSQTSFHLRKPSVHISDTAEYFCAVSDSSYKLIFGSGTRLLVRPDIQNPDPAVY

SEQ ID NO: 3748 - protein, 127 aa, Artificial Sequence
  Description of Artificial Sequence: Synthetic polypeptide
METLLGLLILWLQLQWVSSKQEVTQIPAALSVPEGENLVLNCSFTDSAIYNLQWFRQDPGKGLTSLLLIQSSQREQTSGRLNASLDKSSGRSTLYIAASQPGDSATYLCAPNNARLMFGDGTQLVVK

SEQ ID NO: 3749 - protein, 128 aa, Artificial Sequence
  Description of Artificial Sequence: Synthetic polypeptide
METLLGLLILWLQLQWVSSKQEVTQIPAALSVPEGENLVLNCSFTDSAIYNLQWFRQDPGKGLTSLLLIQSSQREQTSGRLNASLDKSSGRSTLYIAASQPGDSATYLCAANSGYALNFGKGTSLLVT

SEQ ID NO: 3750 - protein, 131 aa, Artificial Sequence
  Description of Artificial Sequence: Synthetic polypeptide
MLLITSMLVLWMQLSQVNGQQVMQIPQYQHVQEGEDFTTYCNSSTTLSNIQWYKQRPGGHPVFLIQLVKSGEVKKQKRLTFQFGEAKKNSSLHITATQTTDVGTYFCAGPGYSGAGSYQLTFGKGTKLSVI

SEQ ID NO: 3751 - protein, 129 aa, Artificial Sequence
  Description of Artificial Sequence: Synthetic polypeptide
METLLGLLILWLQLQWVSSKQEVTQIPAALSVPEGENLVLNCSFTDSAIYNLQWFRQDPGKGLTSLLLIQSSQREQTSGRLNASLDKSSGRSTLYIAASQPGDSATYLCAVVDSNYQLIWGAGTKLIIK

SEQ ID NO: 3752 - protein, 128 aa, Artificial Sequence
  Description of Artificial Sequence: Synthetic polypeptide
METLLGLLILWLQLQWVSSKQEVTQIPAALSVPEGENLVLNCSFTDSAIYNLQWFRQDPGKGLTSLLLIQSSQREQTSGRLNASLDKSSGRSTLYIAASQPGDSATYLCAVFGGNQFYFGTGTSLTVI

SEQ ID NO: 3753 - protein, 126 aa, Artificial Sequence
  Description of Artificial Sequence: Synthetic polypeptide
MWGAFLLYVSMKMGGTAGQSLEQPSEVTAVEGAIVQINCTYQTSGFYGLSWYQQHDGGAPTFLSYNALDGLEETGRFSSFLSRSDSYGYLLLQELQMKDSASYFCAVLPYNTDKLIFGTGTRLQVF

SEQ ID NO: 3754 - protein, 133 aa, Artificial Sequence
  Description of Artificial Sequence: Synthetic polypeptide
MEKNPLAAPLLILWFHLDCVSSILNVEQSPQSLHVQEGDSTNFTCSFPSSNFYALHWYRWETAKSPEALFVMTLNGDEKKKGRISATLNTKEGYSYLYIKGSQPEDSATYLCAPASGGSYIPTFGRGTSLIVH

SEQ ID NO: 3755 - protein, 137 aa, Artificial Sequence
  Description of Artificial Sequence: Synthetic polypeptide
MWGAFLLYVSMKMGGTAGQSLEQPSEVTAVEGAIVQINCTYQTSGFYGLSWYQQHDGGAPTFLSYNALDGLEETGRFSSFLSRSDSYGYLLLQELQMKDSASYLCAVGGQAGTALIFGKGTTLSVSSNIQNPDPAVY

SEQ ID NO: 3756 - protein, 139 aa, Artificial Sequence
  Description of Artificial Sequence: Synthetic polypeptide
METLLGLLILWLQLQWVSSKQEVTQIPAALSVPEGENLVLNCSFTDSAIYNLQWFRQDPGKGLTSLLLIQSSQREQTSGRLNASLDKSSGRSTLYIAASQPGDSATYLCAVQAGTALIFGKGTTLSVSSNIQNPDPAVY

SEQ ID NO: 3757 - protein, 129 aa, Artificial Sequence
  Description of Artificial Sequence: Synthetic polypeptide
METLLGLLILWLQLQWVSSKQEVTQIPAALSVPEGENLVLNCSFTDSAIYNLQWFRQDPGKGLTSLLLIQSSQREQTSGRLNASLDKSSGRSTLYIAASQPGDSATYLCAVLDNNNDMRFGAGTRLTVK

SEQ ID NO: 3758 - protein, 140 aa, Artificial Sequence
  Description of Artificial Sequence: Synthetic polypeptide
METLLGLLILWLQLQWVSSKQEVTQIPAALSVPEGENLVLNCSFTDSAIYNLQWFRQDPGKGLTSLLLIQSSQREQTSGRLNASLDKSSGRSTLYIAASQPGDSATYLCAVRSRDDKIIFGKGTRLHILPNIQNPDPAVY

SEQ ID NO: 3759 - protein, 129 aa, Artificial Sequence
  Description of Artificial Sequence: Synthetic polypeptide
METLLGLLILWLQLQWVSSKQEVTQIPAALSVPEGENLVLNCSFTDSAIYNLQWFRQDPGKGLTSLLLIQSSQREQTSGRLNASLDKSSGRSTLYIAASQPGDSATYLCAVTTSRDRLMFGDGTQLVVK

SEQ ID NO: 3760 - protein, 142 aa, Artificial Sequence
  Description of Artificial Sequence: Synthetic polypeptide
MRLVARVTVFLTFGTIIDAKTTQPPSMDCAEGRAANLPCNHSTISGNEYVYWYRQIHSQGPQYIIHGLKNNETNEMASLIITEDRKSSTLILPHATLRDTAVYYCIVSSRGGSGGGADGLTFGKGTHLIIQPYIQNPDPAVY

SEQ ID NO: 3761 - protein, 129 aa, Artificial Sequence
  Description of Artificial Sequence: Synthetic polypeptide
METLLGLLILWLQLQWVSSKQEVTQIPAALSVPEGENLVLNCSFTDSAIYNLQWFRQDPGKGLTSLLLIQSSQREQTSGRLNASLDKSSGRSTLYIAASQPGDSATYLCAVRDRHNDMRFGAGTRLTVK

SEQ ID NO: 3762 - protein, 135 aa, Artificial Sequence
  Description of Artificial Sequence: Synthetic polypeptide
MAMLLGASVLILWLQPDWVNSQQKNDDQQVKQNSPSLSVQEGRISILNCDYTNSMFDYFLWYKKYPAEGPTFLISISSIKDKNEDGRFTVFLNKSAKHLSLHIVPSQPGDSAVYFCAATRSYQLTFGKGTKLSVI

SEQ ID NO: 3763 - protein, 126 aa, Artificial Sequence
  Description of Artificial Sequence: Synthetic polypeptide
MKLVTSITVLLSLGIMGDAKTTQPNSMESNEEEPVHLPCNHSTISGTDYIHWYRQLPSQGPEYVIHGLTSNVNNRMASLAIAEDRKSSTLILHRATLRDAAVYYCILFTGTASKLTFGTGTRLQVT

SEQ ID NO: 3764 - protein, 129 aa, Artificial Sequence
  Description of Artificial Sequence: Synthetic polypeptide
METLLGLLILWLQLQWVSSKQEVTQIPAALSVPEGENLVLNCSFTDSAIYNLQWFRQDPGKGLTSLLLIQSSQREQTSGRLNASLDKSSGRSTLYIAASQPGDSATYLCAVLDNNARLMFGDGTQLVVK

SEQ ID NO: 3765 - protein, 129 aa, Artificial Sequence
  Description of Artificial Sequence: Synthetic polypeptide
METLLGLLILWLQLQWVSSKQEVTQIPAALSVPEGENLVLNCSFTDSAIYNLQWFRQDPGKGLTSLLLIQSSQREQTSGRLNASLDKSSGRSTLYIAASQPGDSATYLCAVQTGANNLFFGTGTRLTVI

SEQ ID NO: 3766 - protein, 143 aa, Artificial Sequence
  Description of Artificial Sequence: Synthetic polypeptide
MLLELIPLLGIHFVLRTARAQSVTQPDIHITVSEGASLELRCNYSYGATPYLFWYVQSPGQGLQLLLKYFSGDTLVQGIKGFEAEFKRSQSSFNLRKPSVHWSDAAEYFCAVVNYQAGTALIFGKGTTLSVSSNIQNPDPAVY

SEQ ID NO: 3767 - protein, 137 aa, Artificial Sequence
  Description of Artificial Sequence: Synthetic polypeptide
MAMLLGASVLILWLQPDWVNSQQKNDDQQVKQNSPSLSVQEGRISILNCDYTNSMFDYFLWYKKYPAEGPTFLISISSIKDKNEDGRFTVFLNKSAKHLSLHIVPSQPGDSAVYFCAASAAGTYKYIFGTGTRLKVL

SEQ ID NO: 3768 - protein, 131 aa, Artificial Sequence
  Description of Artificial Sequence: Synthetic polypeptide
METLLKVLSGTLLWQLTWVRSQQPVQSPQAVILREGEDAVINCSSSKALYSVHWYRQKHGEAPVFLMILLKGGEQKGHEKISASFNEKKQQSSLYLTASQLSYSGTYFCGTGYGGATNKLIFGTGTLLAVQ

SEQ ID NO: 3769 - protein, 146 aa, Artificial Sequence
  Description of Artificial Sequence: Synthetic polypeptide
MACPGFLWALVISTCLEFSMAQTVTQSQPEMSVQEAETVTLSCTYDTSESDYYLFWYKQPPSRQMILVIRQEAYKQQNATENRFSVNFQKAAKSFSLKISDSQLGDAAMYFCAYRSAVIYGQNFVFGPGTRLSVLPYIQNPDPAVY

SEQ ID NO: 3770 - protein, 130 aa, Artificial Sequence
  Description of Artificial Sequence: Synthetic polypeptide
MISLRVLLVILWLQLSWVWSQRKEVEQDPGPFNVPEGATVAFNCTYSNSASQSFFWYRQDCRKEPKLLMSVYSSGNEDGRFTAQLNRASQYISLLIRDSKLSDSATYLCVVNPGGSYIPTFGRGTSLIVH

SEQ ID NO: 3771 - protein, 128 aa, Artificial Sequence
  Description of Artificial Sequence: Synthetic polypeptide
METLLGLLILWLQLQWVSSKQEVTQIPAALSVPEGENLVLNCSFTDSAIYNLQWFRQDPGKGLTSLLLIQSSQREQTSGRLNASLDKSSGRSTLYIAASQPGDSATYLCAVEYGNKLVFGAGTILRVK

SEQ ID NO: 3772 - protein, 146 aa, Artificial Sequence
  Description of Artificial Sequence: Synthetic polypeptide
MACPGFLWALVISTCLEFSMAQTVTQSQPEMSVQEAETVTLSCTYDTSESDYYLFWYKQPPSRQMILVIRQEAYKQQNATENRFSVNFQKAAKSFSLKISDSQLGDAAMYFCAYRSAGGGADGLTFGKGTHLIIQPYIQNPDPAVY

SEQ ID NO: 3773 - protein, 143 aa, Artificial Sequence
  Description of Artificial Sequence: Synthetic polypeptide
METLLGLLILWLQLQWVSSKQEVTQIPAALSVPEGENLVLNCSFTDSAIYNLQWFRQDPGKGLTSLLLIQSSQREQTSGRLNASLDKSSGRSTLYIAASQPGDSATYLCAVLKPNQAGTALIFGKGTTLSVSSNIQNPDPAVY

SEQ ID NO: 3774 - protein, 130 aa, Artificial Sequence
  Description of Artificial Sequence: Synthetic polypeptide
MKSLRVLLVILWLQLSWVWSQQKEVEQNSGPLSVPEGAIASLNCTYSDRGSQSFFWYRQYSGKSPELIMFIYSNGDKEDGRFTAQLNKASQYVSLLIRDSQPSDSATYLCAVPMGNTPLVFGKGTRLSVI

SEQ ID NO: 3775 - protein, 133 aa, Artificial Sequence
  Description of Artificial Sequence: Synthetic polypeptide
MASAPISMLAMLFTLSGLRAQSVAQPEDQVNVAEGNPLTVKCTYSVSGNPYLFWYVQYPNRGLQFLLKYITGDNLVKGSYGFEAEFNKSQTSFHLKKPSALVSDSALYFCAVRDLSGGSYIPTFGRGTSLIVH

SEQ ID NO: 3776 - protein, 130 aa, Artificial Sequence
  Description of Artificial Sequence: Synthetic polypeptide
MLLLLVPAFQVIFTLGGTRAQSVTQLDSQVPVFEEAPVELRCNYSSSVSVYLFWYVQYPNQGLQLLLKYLSGSTLVKGINGFEAEFNKSQTSFHLRKPSVHISDTAEYFCAVRGGTYKYIFGTGTRLKVL

SEQ ID NO: 3777 - protein, 132 aa, Artificial Sequence
  Description of Artificial Sequence: Synthetic polypeptide
MACPGFLWALVISTCLEFSMAQTVTQSQPEMSVQEAETVTLSCTYDTSESDYYLFWYKQPPSRQMILVIRQEAYKQQNATENRFSVNFQKAAKSFSLKISDSQLGDAAMYFCASQGGSEKLVFGKGTKLTVN

SEQ ID NO: 3778 - protein, 142 aa, Artificial Sequence
  Description of Artificial Sequence: Synthetic polypeptide
MLLLLVPAFQVIFTLGGTRAQSVTQLDSQVPVFEEAPVELRCNYSSSVSVYLFWYVQYPNQGLQLLLKYLSGSTLVKGINGFEAEFNKSQTSFHLRKPSVHISDTAEYFCAGPTGGGNKLTFGTGTQLKVELNIQNPDPAVY

SEQ ID NO: 3779 - protein, 141 aa, Artificial Sequence
  Description of Artificial Sequence: Synthetic polypeptide
METLLGLLILWLQLQWVSSKQEVTQIPAALSVPEGENLVLNCSFTDSAIYNLQWFRQDPGKGLTSLLLIQSSQREQTSGRLNASLDKSSGRSTLYIAASQPGDSATYLCAVLGSNDYKLSFGAGTTVTVRSNIQNPDPAVY

SEQ ID NO: 3780 - protein, 133 aa, Artificial Sequence
  Description of Artificial Sequence: Synthetic polypeptide
MTSIRAVFIFLWLQLDLVNGENVEQHPSTLSVQEGDSAVIKCTYSDSASNYFPWYKQELGKGPQLIIDIRSNVGEKKDQRIAVTLNKTAKHFSLHITETQPEDSAVYFCAAMAYSGAGSYQLTFGKGTKLSVI

SEQ ID NO: 3781 - protein, 138 aa, Artificial Sequence
  Description of Artificial Sequence: Synthetic polypeptide
MWGVFLLYVSMKMGGTTGQNIDQPTEMTATEGAIVQINCTYQTSGFNGLFWYQQHAGEAPTFLSYNVLDGLEEKGRFSSFLSRSKGYSYLLLKELQMKDSASYLCAVRANQAGTALIFGKGTTLSVSSNIQNPDPAVY

SEQ ID NO: 3782 - protein, 139 aa, Artificial Sequence
  Description of Artificial Sequence: Synthetic polypeptide
MLLEHLLIILWMQLTWVSGQQLNQSPQSMFIQEGEDVSMNCTSSSIFNTWLWYKQDPGEGPVLLIALYKAGELTSNGRLTAQFGITRKDSFLNISASIPSDVGIYFCAGRDNYGQNFVFGPGTRLSVLPYIQNPDPAVY

SEQ ID NO: 3783 - protein, 134 aa, Artificial Sequence
  Description of Artificial Sequence: Synthetic polypeptide
MACPGFLWALVISTCLEFSMAQTVTQSQPEMSVQEAETVTLSCTYDTSESDYYLFWYKQPPSRQMILVIRQEAYKQQNATENRFSVNFQKAAKSFSLKISDSQLGDAAMYFCAYRSGYNNNDMRFGAGTRLTVK

SEQ ID NO: 3784 - protein, 132 aa, Artificial Sequence
  Description of Artificial Sequence: Synthetic polypeptide
MKTFAGFSFLFLWLQLDCMSRGEDVEQSLFLSVREGDSSVINCTYTDSSSTYLYWYKQEPGAGLQLLTYIFSNMDMKQDQRLTVLLNKKDKHLSLRIADTQTGDSAIYFCAESGSGATNKLIFGTGTLLAVQ

SEQ ID NO: 3785 - protein, 130 aa, Artificial Sequence
  Description of Artificial Sequence: Synthetic polypeptide
MTSIRAVFIFLWLQLDLVNGENVEQHPSTLSVQEGDSAVIKCTYSDSASNYFPWYKQELGKGPQLIIDIRSNVGEKKDQRIAVTLNKTAKHFSLHITETQPEDSAVYFCAAGGYNFNKFYFGSGTKLNVK

SEQ ID NO: 3786 - protein, 143 aa, Artificial Sequence
  Description of Artificial Sequence: Synthetic polypeptide
MKSLRVLLVILWLQLSWVWSQQKEVEQNSGPLSVPEGAIASLNCTYSDRGSQSFFWYRQYSGKSPELIMFIYSNGDKEDGRFTAQLNKASQYVSLLIRDSQPSDSATYLCAVPRGGGADGLTFGKGTHLIIQPYIQNPDPAVY

SEQ ID NO: 3787 - protein, 129 aa, Artificial Sequence
  Description of Artificial Sequence: Synthetic polypeptide
METLLGLLILWLQLQWVSSKQEVTQIPAALSVPEGENLVLNCSFTDSAIYNLQWFRQDPGKGLTSLLLIQSSQREQTSGRLNASLDKSSGRSTLYIAASQPGDSATYLCAVRDNNARLMFGDGTQLVVK

SEQ ID NO: 3788 - protein, 138 aa, Artificial Sequence
  Description of Artificial Sequence: Synthetic polypeptide
MEKNPLAAPLLILWFHLDCVSSILNVEQSPQSLHVQEGDSTNFTCSFPSSNFYALHWYRWETAKSPEALFVMTLNGDEKKKGRISATLNTKEGYSYLYIKGSQPEDSATYLCAFPSVRGGGTSYGKLTFGQGTILTVH

SEQ ID NO: 3789 - protein, 134 aa, Artificial Sequence
  Description of Artificial Sequence: Synthetic polypeptide
METLLGLLILWLQLQWVSSKQEVTQIPAALSVPEGENLVLNCSFTDSAIYNLQWFRQDPGKGLTSLLLIQSSQREQTSGRLNASLDKSSGRSTLYIAASQPGDSATYLCAVKPGAGGTSYGKLTFGQGTILTVH

SEQ ID NO: 3790 - protein, 131 aa, Artificial Sequence
  Description of Artificial Sequence: Synthetic polypeptide
MMKCPQALLAIFWLLLSWVSSEDKVVQSPLSLVVHEGDTVTLNCSYEVTNFRSLLWYKQEKKAPTFLFMLTSSGIEKKSGRLSSILDKKELFSILNITATQTGDSAVYLCAVNTGTASKLTFGTGTRLQVT

SEQ ID NO: 3791 - protein, 131 aa, Artificial Sequence
  Description of Artificial Sequence: Synthetic polypeptide
MASAPISMLAMLFTLSGLRAQSVAQPEDQVNVAEGNPLTVKCTYSVSGNPYLFWYVQYPNRGLQFLLKYITGDNLVKGSYGFEAEFNKSQTSFHLKKPSALVSDSALYFCAVRERGNTPLVFGKGTRLSVI

SEQ ID NO: 3792 - protein, 140 aa, Artificial Sequence
  Description of Artificial Sequence: Synthetic polypeptide
MAMLLGASVLILWLQPDWVNSQQKNDDQQVKQNSPSLSVQEGRISILNCDYTNSMFDYFLWYKKYPAEGPTFLISISSIKDKNEDGRFTVFLNKSAKHLSLHIVPSQPGDSAVYFCAAKGVGGTSYGKLTFGQGTILTVH

SEQ ID NO: 3793 - protein, 131 aa, Artificial Sequence
  Description of Artificial Sequence: Synthetic polypeptide
MISLRVLLVILWLQLSWVWSQRKEVEQDPGPFNVPEGATVAFNCTYSNSASQSFFWYRQDCRKEPKLLMSVYSSGNEDGRFTAQLNRASQYISLLIRDSKLSDSATYLCVVPASGGSYIPTFGRGTSLIVH

SEQ ID NO: 3794 - protein, 148 aa, Artificial Sequence
  Description of Artificial Sequence: Synthetic polypeptide
MLTASLLRAVIASICVVSSMAQKVTQAQTEISVVEKEDVTLDCVYETRDTTYYLFWYKQPPSGELVFLIRRNSFDEQNEISGRYSWNFQKSTSSFNFTITASQVVDSAVYFCALSEAANSGGYQKVTFGTGTKLQVIPNIQNPDPAVY

SEQ ID NO: 3795 - protein, 124 aa, Artificial Sequence
  Description of Artificial Sequence: Synthetic polypeptide
METLLGVSLVILWLQLARVNSQQGEEDPQALSIQEGENATMNCSYKTSINNLQWYRQNSGRGLVHLILIRSNEREKHSGRLRVTLDTSKKSSSLLITASRAADTASYFCGIDMRFGAGTRLTVK

SEQ ID NO: 3796 - protein, 142 aa, Artificial Sequence
  Description of Artificial Sequence: Synthetic polypeptide
MMKSLRVLLVILWLQLSWVWSQQKEVEQDPGPLSVPEGAIVSLNCTYSNSAFQYFMWYRQYSRKGPELLMYTYSSGNKEDGRFTAQVDKSSKYISLFIRDSQPSDSATYLCAMSANDYKLSFGAGTTVTVRSNIQNPDPAVY

SEQ ID NO: 3797 - protein, 133 aa, Artificial Sequence
  Description of Artificial Sequence: Synthetic polypeptide
METLLGLLILWLQLQWVSSKQEVTQIPAALSVPEGENLVLNCSFTDSAIYNLQWFRQDPGKGLTSLLLIQSSQREQTSGRLNASLDKSSGRSTLYIAASQPGDSATYLCAVLNAGGTSYGKLTFGQGTILTVH

SEQ ID NO: 3798 - protein, 133 aa, Artificial Sequence
  Description of Artificial Sequence: Synthetic polypeptide
METLLGLLILWLQLQWVSSKQEVTQIPAALSVPEGENLVLNCSFTDSAIYNLQWFRQDPGKGLTSLLLIQSSQREQTSGRLNASLDKSSGRSTLYIAASQPGDSATYLCAVNSEIYNQGGKLIFGQGTELSVK

SEQ ID NO: 3799 - protein, 134 aa, Artificial Sequence
  Description of Artificial Sequence: Synthetic polypeptide
MWGAFLLYVSMKMGGTAGQSLEQPSEVTAVEGAIVQINCTYQTSGFYGLSWYQQHDGGAPTFLSYNALDGLEETGRFSSFLSRSDSYGYLLLQELQMKDSASYFCALIRDDKIIFGKGTRLHILNIQNPDPAVY

SEQ ID NO: 3800 - protein, 130 aa, Artificial Sequence
  Description of Artificial Sequence: Synthetic polypeptide
MKSLRVLLVILWLQLSWVWSQQKEVEQNSGPLSVPEGAIASLNCTYSDRGSQSFFWYRQYSGKSPELIMFIYSNGDKEDGRFTAQLNKASQYVSLLIRDSQPSDSATYLCAVNNGNNDMRFGAGTRLTVK

SEQ ID NO: 3801 - protein, 146 aa, Artificial Sequence
  Description of Artificial Sequence: Synthetic polypeptide
MEKNPLAAPLLILWFHLDCVSSILNVEQSPQSLHVQEGDSTNFTCSFPSSNFYALHWYRWETAKSPEALFVMTLNGDEKKKGRISATLNTKEGYSYLYIKGSQPEDSATYLCAFDALTGGGNKLTFGTGTQLKVELNIQNPDPAVY

SEQ ID NO: 3802 - protein, 131 aa, Artificial Sequence
  Description of Artificial Sequence: Synthetic polypeptide
MKTFAGFSFLFLWLQLDCMSRGEDVEQSLFLSVREGDSSVINCTYTDSSSTYLYWYKQEPGAGLQLLTYIFSNMDMKQDQRLTVLLNKKDKHLSLRIADTQTGDSAIYFCAELNTGGFKTIFGAGTRLFVK

SEQ ID NO: 3803 - protein, 130 aa, Artificial Sequence
  Description of Artificial Sequence: Synthetic polypeptide
METLLGLLILWLQLQWVSSKQEVTQIPAALSVPEGENLVLNCSFTDSAIYNLQWFRQDPGKGLTSLLLIQSSQREQTSGRLNASLDKSSGRSTLYIAASQPGDSATYLCAVFTSGTYKYIFGTGTRLKVL

SEQ ID NO: 3804 - protein, 140 aa, Artificial Sequence
  Description of Artificial Sequence: Synthetic polypeptide
MTSIRAVFIFLWLQLDLVNGENVEQHPSTLSVQEGDSAVIKCTYSDSASNYFPWYKQELGKGPQLIIDIRSNVGEKKDQRIAVTLNKTAKHFSLHITETQPEDSAVYFCAAKGGADGLTFGKGTHLIIQPYIQNPDPAVY

SEQ ID NO: 3805 - protein, 143 aa, Artificial Sequence
  Description of Artificial Sequence: Synthetic polypeptide
MISLRVLLVILWLQLSWVWSQRKEVEQDPGPFNVPEGATVAFNCTYSNSASQSFFWYRQDCRKEPKLLMSVYSSGNEDGRFTAQLNRASQYISLLIRDSKLSDSATYLCVVNDRGNYGQNFVFGPGTRLSVLPYIQNPDPAVY

SEQ ID NO: 3806 - protein, 140 aa, Artificial Sequence
  Description of Artificial Sequence: Synthetic polypeptide
MKLVTSITVLLSLGIMGDAKTTQPNSMESNEEEPVHLPCNHSTISGTDYIHWYRQLPSQGPEYVIHGLTSNVNNRMASLAIAEDRKSSTLILHRATLRDAAVYYCILLPYSGGGADGLTFGKGTHLIIQPYIQNPDPAVY

SEQ ID NO: 3807 - protein, 129 aa, Artificial Sequence
  Description of Artificial Sequence: Synthetic polypeptide
MKRILGALLGLLSAQVCCVRGIQVEQSPPDLILQEGANSTLRCNFSDSVNNLQWFHQNPWGQLINLFYIPSGTKQNGRLSATTVATERYSLLYISSSQTTDSGVYFCAVPIYNQGGKLIFGQGTELSVK

SEQ ID NO: 3808 - protein, 137 aa, Artificial Sequence
  Description of Artificial Sequence: Synthetic polypeptide
MLTASLLRAVIASICVVSSMAQKVTQAQTEISVVEKEDVTLDCVYETRDTTYYLFWYKQPPSGELVFLIRRNSFDEQNEISGRYSWNFQKSTSSFNFTITASQVVDSAVYFCALSEAYYGGSQGNLIFGKGTKLSVK

SEQ ID NO: 3809 - protein, 134 aa, Artificial Sequence
  Description of Artificial Sequence: Synthetic polypeptide
METLLGVSLVILWLQLARVNSQQGEEDPQALSIQEGENATMNCSYKTSINNLQWYRQNSGRGLVHLILIRSNEREKHSGRLRVTLDTSKKSSSLLITASRAADTASYFCATVSFAGGTSYGKLTFGQGTILTVH

SEQ ID NO: 3810 - protein, 130 aa, Artificial Sequence
  Description of Artificial Sequence: Synthetic polypeptide
MISLRVLLVILWLQLSWVWSQRKEVEQDPGPFNVPEGATVAFNCTYSNSASQSFFWYRQDCRKEPKLLMSVYSSGNEDGRFTAQLNRASQYISLLIRDSKLSDSATYLCVVNRDAGNMLTFGGGTRLMVK

SEQ ID NO: 3811 - protein, 126 aa, Artificial Sequence
  Description of Artificial Sequence: Synthetic polypeptide
MWGAFLLYVSMKMGGTAGQSLEQPSEVTAVEGAIVQINCTYQTSGFYGLSWYQQHDGGAPTFLSYNALDGLEETGRFSSFLSRSDSYGYLLLQELQMKDSASYFCAVRAGGRRALTFGSGTRLQVQ

SEQ ID NO: 3812 - protein, 151 aa, Artificial Sequence
  Description of Artificial Sequence: Synthetic polypeptide
MDKILGASFLVLWLQLCWVSGQQKEKSDQQQVKQSPQSLIVQKGGISIINCAYENTAFDYFPWYQQFPGKGPALLIAIRPDVSEKKEGRFTISFNKSAKQFSLHIMDSQPGDSATYFCAATDSGGYQKVTFGTGTKLQVIPNIQNPDPAVY

SEQ ID NO: 3813 - protein, 128 aa, Artificial Sequence
  Description of Artificial Sequence: Synthetic polypeptide
MWGVFLLYVSMKMGGTTGQNIDQPTEMTATEGAIVQINCTYQTSGFNGLFWYQQHAGEAPTFLSYNVLDGLEEKGRFSSFLSRSKGYSYLLLKELQMKDSASYLCAVRDYWAGSYQLTFGKGTKLSVI

SEQ ID NO: 3814 - protein, 136 aa, Artificial Sequence
  Description of Artificial Sequence: Synthetic polypeptide
MAMLLGASVLILWLQPDWVNSQQKNDDQQVKQNSPSLSVQEGRISILNCDYTNSMFDYFLWYKKYPAEGPTFLISISSIKDKNEDGRFTVFLNKSAKHLSLHIVPSQPGDSAVYFCAASASSDKLIFGTGTRLQVF

SEQ ID NO: 3815 - protein, 132 aa, Artificial Sequence
  Description of Artificial Sequence: Synthetic polypeptide
MISLRVLLVILWLQLSWVWSQRKEVEQDPGPFNVPEGATVAFNCTYSNSASQSFFWYRQDCRKEPKLLMSVYSSGNEDGRFTAQLNRASQYISLLIRDSKLSDSATYLCVVPGRGYNFNKFYFGSGTKLNVK

SEQ ID NO: 3816 - protein, 131 aa, Artificial Sequence
  Description of Artificial Sequence: Synthetic polypeptide
MNYSPGLVSLILLLLGRTRGNSVTQMEGPVTLSEEAFLTINCTYTATGYPSLFWYVQYPGEGLQLLLKATKADDKGSNKGFEATYRKETTSFHLEKGSVQVSDSAVYFCALSDKQGNTPLVFGKGTRLSVI

SEQ ID NO: 3817 - protein, 131 aa, Artificial Sequence
  Description of Artificial Sequence: Synthetic polypeptide
MVLKFSVSILWIQLAWVSTQLLEQSPQFLSIQEGENLTVYCNSSSVFSSLQWYRQEPGEGPVLLVTVVTGGEVKKLKRLTFQFGDARKDSSLHITAAQPGDTGLYLCAGAGQWSSGTYKYIFGTGTRLKVL

SEQ ID NO: 3818 - protein, 129 aa, Artificial Sequence
  Description of Artificial Sequence: Synthetic polypeptide
METLLGLLILWLQLQWVSSKQEVTQIPAALSVPEGENLVLNCSFTDSAIYNLQWFRQDPGKGLTSLLLIQSSQREQTSGRLNASLDKSSGRSTLYIAASQPGDSATYLCAVVNNNARLMFGDGTQLVVK

SEQ ID NO: 3819 - protein, 146 aa, Artificial Sequence
  Description of Artificial Sequence: Synthetic polypeptide
MLTASLLRAVIASICVVSSMAQKVTQAQTEISVVEKEDVTLDCVYETRDTTYYLFWYKQPPSGELVFLIRRNSFDEQNEISGRYSWNFQKSTSSFNFTITASQVVDSAVYFCALSEEVNRDDKIIFGKGTRLHILPNIQNPDPAVY

SEQ ID NO: 3820 - protein, 135 aa, Artificial Sequence
  Description of Artificial Sequence: Synthetic polypeptide
MWGAFLLYVSMKMGGTAGQSLEQPSEVTAVEGAIVQINCTYQTSGFYGLSWYQQHDGGAPTFLSYNALDGLEETGRFSSFLSRSDSYGYLLLQELQMKDSASYFCAGNYGQNFVFGPGTRLSVLPYIQNPDPAVY

SEQ ID NO: 3821 - protein, 124 aa, Artificial Sequence
  Description of Artificial Sequence: Synthetic polypeptide
MWGVFLLYVSMKMGGTTGQNIDQPTEMTATEGAIVQINCTYQTSGFNGLFWYQQHAGEAPTFLSYNVLDGLEEKGRFSSFLSRSKGYSYLLLKELQMKDSASYLCAVQKHYQLIWGAGTKLIIK

SEQ ID NO: 3822 - protein, 128 aa, Artificial Sequence
  Description of Artificial Sequence: Synthetic polypeptide
MRLVARVTVFLTFGTIIDAKTTQPTSMDCAEGRAANLPCNHSTISGNEYVYWYRQIHSQGPQYIIHGLKNNETNEMASLIITEDRKSSTLILPHATLRDTAVYYCIVRPLKTSYDKVIFGPGTSLSVI

SEQ ID NO: 3823 - protein, 123 aa, Artificial Sequence
  Description of Artificial Sequence: Synthetic polypeptide
MNSSLDFLILILMFGGTSSNSVKQTGQITVSEGASVTMNCTYTSTGYPTLFWYVEYPSKPLQLLQRETMENSKNFGGGNIKDKNSPIVKYSVQVSDSAVYYCLPVLYSGYALNFGKGTSLLVT

SEQ ID NO: 3824 - protein, 131 aa, Artificial Sequence
  Description of Artificial Sequence: Synthetic polypeptide
MKSLRVLLVILWLQLSWVWSQQKEVEQNSGPLSVPEGAIASLNCTYSDRGSQSFFWYRQYSGKSPELIMFIYSNGDKEDGRFTAQLNKASQYVSLLIRDSQPSDSATYLCAVSRNNNARLMFGDGTQLVVK

SEQ ID NO: 3825 - protein, 127 aa, Artificial Sequence
  Description of Artificial Sequence: Synthetic polypeptide
MKTFAGFSFLFLWLQLDCMSRGEDVEQSLFLSVREGDSSVINCTYTDSSSTYLYWYKQEPGAGLQLLTYIFSNMDMKQDQRLTVLLNKKDKHLSLRIADTQTGDSAIYFCAESGDMRFGAGTRLTVK

SEQ ID NO: 3826 - protein, 136 aa, Artificial Sequence
  Description of Artificial Sequence: Synthetic polypeptide
MEKNPLAAPLLILWFHLDCVSSILNVEQSPQSLHVQEGDSTNFTCSFPSSNFYALHWYRWETAKSPEALFVMTLNGDEKKKGRISATLNTKEGYSYLYIKGSQPEDSATYLCALSNAGGTSYGKLTFGQGTILTVH

SEQ ID NO: 3827 - protein, 138 aa, Artificial Sequence
  Description of Artificial Sequence: Synthetic polypeptide
MWGVFLLYVSMKMGGTTGQNIDQPTEMTATEGAIVQINCTYQTSGFNGLFWYQQHAGEAPTFLSYNVLDGLEEKGRFSSFLSRSKGYSYLLLKELQMKDSASYLCAVRVDSGYSTLTFGKGTMLLVSPDIQNPDPAVY

SEQ ID NO: 3828 - protein, 129 aa, Artificial Sequence
  Description of Artificial Sequence: Synthetic polypeptide
METLLGLLILWLQLQWVSSKQEVTQIPAALSVPEGENLVLNCSFTDSAIYNLQWFRQDPGKGLTSLLLIQSSQREQTSGRLNASLDKSSGRSTLYIAASQPGDSATYLCAVRDSNYQLIWGAGTKLIIK

SEQ ID NO: 3829 - protein, 129 aa, Artificial Sequence
  Description of Artificial Sequence: Synthetic polypeptide
METLLGLLILWLQLQWVSSKQEVTQIPAALSVPEGENLVLNCSFTDSAIYNLQWFRQDPGKGLTSLLLIQSSQREQTSGRLNASLDKSSGRSTLYIAASQPGDSATYLCAVANAGNMLTFGGGTRLMVK

SEQ ID NO: 3830 - protein, 138 aa, Artificial Sequence
  Description of Artificial Sequence: Synthetic polypeptide
METLLGLLILWLQLQWVSSKQEVTQIPAALSVPEGENLVLNCSFTDSAIYNLQWFRQDPGKGLTSLLLIQSSQREQTSGRLNASLDKSSGRSTLYIAASQPGDSATYLCAVNDYKLSFGAGTTVTVRSNIQNPDPAVY

SEQ ID NO: 3831 - protein, 148 aa, Artificial Sequence
  Description of Artificial Sequence: Synthetic polypeptide
MAMLLGASVLILWLQPDWVNSQQKNDDQQVKQNSPSLSVQEGRISILNCDYTNSMFDYFLWYKKYPAEGPTFLISISSIKDKNEDGRFTVFLNKSAKHLSLHIVPSQPGDSAVYFCAASEGGNEKLTFGTGTRLTIIPNIQNPDPAVY

SEQ ID NO: 3832 - protein, 142 aa, Artificial Sequence
  Description of Artificial Sequence: Synthetic polypeptide
MTSIRAVFIFLWLQLDLVNGENVEQHPSTLSVQEGDSAVIKCTYSDSASNYFPWYKQELGKGPQLIIDIRSNVGEKKDQRIAVTLNKTAKHFSLHITETQPEDSAVYFCAASIGGSARQLTFGSGTQLTVLPDIQNPDPAVY

SEQ ID NO: 3833 - protein, 126 aa, Artificial Sequence
  Description of Artificial Sequence: Synthetic polypeptide
MKKLLAMILWLQLDRLSGELKVEQNPLFLSMQEGKNYTIYCNYSTTSDRLYWYRQDPGKSLESLFVLLSNGAVKQEGRLMASLDTKARLSTLHITAAVHDLSATYFCAMNTGNQFYFGTGTSLTVI

SEQ ID NO: 3834 - protein, 131 aa, Artificial Sequence
  Description of Artificial Sequence: Synthetic polypeptide
MTSIRAVFIFLWLQLDLVNGENVEQHPSTLSVQEGDSAVIKCTYSDSASNYFPWYKQELGKGPQLIIDIRSNVGEKKDQRIAVTLNKTAKHFSLHITETQPEDSAVYFCAVLWAQEGGKLIFGQGTELSVK

SEQ ID NO: 3835 - protein, 130 aa, Artificial Sequence
  Description of Artificial Sequence: Synthetic polypeptide
METLLGLLILWLQLQWVSSKQEVTQIPAALSVPEGENLVLNCSFTDSAIYNLQWFRQDPGKGLTSLLLIQSSQREQTSGRLNASLDKSSGRSTLYIAASQPGDSATYLCAVTYTGGFKTIFGAGTRLFVK

SEQ ID NO: 3836 - protein, 129 aa, Artificial Sequence
  Description of Artificial Sequence: Synthetic polypeptide
METLLGLLILWLQLQWVSSKQEVTQIPAALSVPEGENLVLNCSFTDSAIYNLQWFRQDPGKGLTSLLLIQSSQREQTSGRLNASLDKSSGRSTLYIAASQPGDSATYLCAVIDSNYQLIWGAGTKLIIK

SEQ ID NO: 3837 - protein, 135 aa, Artificial Sequence
  Description of Artificial Sequence: Synthetic polypeptide
MLTASLLRAVIASICVVSSMAQKVTQAQTEISVVEKEDVTLDCVYETRDTTYYLFWYKQPPSGELVFLIRRNSFDEQNEISGRYSWNFQKSTSSFNFTITASQVVDSAVYFCALSARRAGSYQLTFGKGTKLSVI

SEQ ID NO: 3838 - protein, 132 aa, Artificial Sequence
  Description of Artificial Sequence: Synthetic polypeptide
MKKHLTTFLVILWLYFYRGNGKNQVEQSPQSLIILEGKNCTLQCNYTVSPFSNLRWYKQDTGRGPVSLTIMTFSENTKSNGRYTATLDADTKQSSLHITASQLSDSASYICVVRNTGFQKLVFGTGTRLLVS

SEQ ID NO: 3839 - protein, 141 aa, Artificial Sequence
  Description of Artificial Sequence: Synthetic polypeptide
METLLGLLILWLQLQWVSSKQEVTQIPAALSVPEGENLVLNCSFTDSAIYNLQWFRQDPGKGLTSLLLIQSSQREQTSGRLNASLDKSSGRSTLYIAASQPGDSATYLCAATNFGNEKLTFGTGTRLTIIPNIQNPDPAVY

SEQ ID NO: 3840 - protein, 131 aa, Artificial Sequence
  Description of Artificial Sequence: Synthetic polypeptide
MKSLRVLLVILWLQLSWVWSQQKEVEQNSGPLSVPEGAIASLNCTYSDRGSQSFFWYRQYSGKSPELIMFIYSNGDKEDGRFTAQLNKASQYVSLLIRDSQPSDSATYLCASPSGGYNKLIFGAGTRLAVH

SEQ ID NO: 3841 - protein, 129 aa, Artificial Sequence
  Description of Artificial Sequence: Synthetic polypeptide
METLLGLLILWLQLQWVSSKQEVTQIPAALSVPEGENLVLNCSFTDSAIYNLQWFRQDPGKGLTSLLLIQSSQREQTSGRLNASLDKSSGRSTLYIAASQPGDSATYLCAVMNNNARLMFGDGTQLVVK

SEQ ID NO: 3842 - protein, 130 aa, Artificial Sequence
  Description of Artificial Sequence: Synthetic polypeptide
METLLGLLILWLQLQWVSSKQEVTQIPAALSVPEGENLVLNCSFTDSAIYNLQWFRQDPGKGLTSLLLIQSSQREQTSGRLNASLDKSSGRSTLYIAASQPGDSATYLCAVPSGGSYIPTFGRGTSLIVH

SEQ ID NO: 3843 - protein, 129 aa, Artificial Sequence
  Description of Artificial Sequence: Synthetic polypeptide
METLLGLLILWLQLQWVSSKQEVTQIPAALSVPEGENLVLNCSFTDSAIYNLQWFRQDPGKGLTSLLLIQSSQREQTSGRLNASLDKSSGRSTLYIAASQPGDSATYLCAVFSGNTPLVFGKGTRLSVI

SEQ ID NO: 3844 - protein, 129 aa, Artificial Sequence
  Description of Artificial Sequence: Synthetic polypeptide
MVKIRQFLLAILWLQLSCVSAAKNEVEQSPQNLTAQEGEFITINCSYSVGISALHWLQQHPGGGIVSLFMLSSGKKKHGRLIATINIQEKHSSLHITASHPRDSAVYICAAPNSGYALNFGKGTSLLVT

SEQ ID NO: 3845 - protein, 130 aa, Artificial Sequence
  Description of Artificial Sequence: Synthetic polypeptide
METLLGVSLVILWLQLARVNSQQGEEDPQALSIQEGENATMNCSYKTSINNLQWYRQNSGRGLVHLILIRSNEREKHSGRLRVTLDTSKKSSSLLITASRAADTASYFCATDYNAGNMLTFGGGTRLMVK

SEQ ID NO: 3846 - protein, 142 aa, Artificial Sequence
  Description of Artificial Sequence: Synthetic polypeptide
MAGIRALFMYLWLQLDWVSRGESVGLHLPTLSVQEGDNSIINCAYSNSASDYFIWYKQESGKGPQFIIDIRSNMDKRQGQRVTVLLNKTVKHLSLQIAATQPGDSAVYFCAENSGGYQKVTFGTGTKLQVIPNIQNPDPAVY

SEQ ID NO: 3847 - protein, 130 aa, Artificial Sequence
  Description of Artificial Sequence: Synthetic polypeptide
METLLGVSLVILWLQLARVNSQQGEEDPQALSIQEGENATMNCSYKTSINNLQWYRQNSGRGLVHLILIRSNEREKHSGRLRVTLDTSKKSSSLLITASRAADTASYFCATAQGGSEKLVFGKGTKLTVN

SEQ ID NO: 3848 - protein, 131 aa, Artificial Sequence
  Description of Artificial Sequence: Synthetic polypeptide
MKTFAGFSFLFLWLQLDCMSRGEDVEQSLFLSVREGDSSVINCTYTDSSSTYLYWYKQEPGAGLQLLTYIFSNMDMKQDQRLTVLLNKKDKHLSLRIADTQTGDSAIYFCAEKPGTASKLTFGTGTRLQVT

SEQ ID NO: 3849 - protein, 133 aa, Artificial Sequence
  Description of Artificial Sequence: Synthetic polypeptide
MASAPISMLAMLFTLSGLRAQSVAQPEDQVNVAEGNPLTVKCTYSVSGNPYLFWYVQYPNRGLQFLLKYITGDNLVKGSYGFEAEFNKSQTSFHLKKPSALVSDSALYFCAVRDTGGAGNMLTFGGGTRLMVK

SEQ ID NO: 3850 - protein, 128 aa, Artificial Sequence
  Description of Artificial Sequence: Synthetic polypeptide
MWGVFLLYVSMKMGGTTGQNIDQPTEMTATEGAIVQINCTYQTSGFNGLFWYQQHAGEAPTFLSYNVLDGLEEKGRFSSFLSRSKGYSYLLLKELQMKDSASYLCAALDGTGGYNKLIFGAGTRLAVH

SEQ ID NO: 3851 - protein, 135 aa, Artificial Sequence
  Description of Artificial Sequence: Synthetic polypeptide
MACPGFLWALVISTCLEFSMAQTVTQSQPEMSVQEAETVTLSCTYDTSESDYYLFWYKQPPSRQMILVIRQEAYKQQNATENRFSVNFQKAAKSFSLKISDSQLGDAAMYFCAYRAPTSGTYKYIFGTGTRLKVL

SEQ ID NO: 3852 - protein, 131 aa, Artificial Sequence
  Description of Artificial Sequence: Synthetic polypeptide
MLLELIPLLGIHFVLRTARAQSVTQPDIHITVSEGASLELRCNYSYGATPYLFWYVQSPGQGLQLLLKYFSGDTLVQGIKGFEAEFKRSQSSFNLRKPSVHWSDAAEYFCAVVWDSGYALNFGKGTSLLVT

SEQ ID NO: 3853 - protein, 133 aa, Artificial Sequence
  Description of Artificial Sequence: Synthetic polypeptide
MKTFAGFSFLFLWLQLDCMSRGEDVEQSLFLSVREGDSSVINCTYTDSSSTYLYWYKQEPGAGLQLLTYIFSNMDMKQDQRLTVLLNKKDKHLSLRIADTQTGDSAIYFCAEFRFSGGYNKLIFGAGTRLAVH

SEQ ID NO: 3854 - protein, 131 aa, Artificial Sequence
  Description of Artificial Sequence: Synthetic polypeptide
MEKNPLAAPLLILWFHLDCVSSILNVEQSPQSLHVQEGDSTNFTCSFPSSNFYALHWYRWETAKSPEALFVMTLNGDEKKKGRISATLNTKEGYSYLYIKGSQPEDSATYLCAFCTGNQFYFGTGTSLTVI

SEQ ID NO: 3855 - protein, 137 aa, Artificial Sequence
  Description of Artificial Sequence: Synthetic polypeptide
MRQVARVIVFLTLSTLSLAKTTQPISMDSYEGQEVNITCSHNNIATNDYITWYQQFPSQGPRFIIQGYKTKVTNEVASLFIPADRKSSTLSLPRVSLSDTAVYYCLHSGGGADGLTFGKGTHLIIQPYIQNPDPAVY

SEQ ID NO: 3856 - protein, 126 aa, Artificial Sequence
  Description of Artificial Sequence: Synthetic polypeptide
MKLVTSITVLLSLGIMGDAKTTQPNSMESNEEEPVHLPCNHSTISGTDYIHWYRQLPSQGPEYVIHGLTSNVNNRMASLAIAEDRKSSTLILHRATLRDAAVYYCIPATGTASKLTFGTGTRLQVT

SEQ ID NO: 3857 - protein, 128 aa, Artificial Sequence
  Description of Artificial Sequence: Synthetic polypeptide
METLLGLLILWLQLQWVSSKQEVTQIPAALSVPEGENLVLNCSFTDSAIYNLQWFRQDPGKGLTSLLLIQSSQREQTSGRLNASLDKSSGRSTLYIAASQPGDSATYLCAVREAGKSTFGDGTTLTVK

SEQ ID NO: 3858 - protein, 125 aa, Artificial Sequence
  Description of Artificial Sequence: Synthetic polypeptide
MRLVARVTVFLTFGTIIDAKTTQPPSMDCAEGRAANLPCNHSTISGNEYVYWYRQIHSQGPQYIIHGLKNNETNEMASLIITEDRKSSTLILPHATLRDTAVYYCIVRVAGNQFYFGTGTSLTVI

SEQ ID NO: 3859 - protein, 131 aa, Artificial Sequence
  Description of Artificial Sequence: Synthetic polypeptide
MISLRVLLVILWLQLSWVWSQRKEVEQDPGPFNVPEGATVAFNCTYSNSASQSFFWYRQDCRKEPKLLMSVYSSGNEDGRFTAQLNRASQYISLLIRDSKLSDSATYLCVVNTNTGRRALTFGSGTRLQVQ

SEQ ID NO: 3860 - protein, 138 aa, Artificial Sequence
  Description of Artificial Sequence: Synthetic polypeptide
METLLGLLILWLQLQWVSSKQEVTQIPAALSVPEGENLVLNCSFTDSAIYNLQWFRQDPGKGLTSLLLIQSSQREQTSGRLNASLDKSSGRSTLYIAASQPGDSATYLCAVDDYKLSFGAGTTVTVRSNIQNPDPAVY

SEQ ID NO: 3861 - protein, 130 aa, Artificial Sequence
  Description of Artificial Sequence: Synthetic polypeptide
MKKLLAMILWLQLDRLSGELKVEQNPLFLSMQEGKNYTIYCNYSTTSDRLYWYRQDPGKSLESLFVLLSNGAVKQEGRLMASLDTKARLSTLHITAAVHDLSATYFCAGLNYGGSQGNLIFGKGTKLSVK

SEQ ID NO: 3862 - protein, 130 aa, Artificial Sequence
  Description of Artificial Sequence: Synthetic polypeptide
MWGVFLLYVSMKMGGTTGQNIDQPTEMTATEGAIVQINCTYQTSGFNGLFWYQQHAGEAPTFLSYNVLDGLEEKGRFSSFLSRSKGYSYLLLKELQMKDSASYLCAVRDPMNNNAGNMLTFGGGTRLMVK

SEQ ID NO: 3863 - protein, 124 aa, Artificial Sequence
  Description of Artificial Sequence: Synthetic polypeptide
MWGAFLLYVSMKMGGTAGQSLEQPSEVTAVEGAIVQINCTYQTSGFYGLSWYQQHDGGAPTFLSYNALDGLEETGRFSSFLSRSDSYGYLLLQELQMKDSASYFCARRNTDKLIFGTGTRLQVF

SEQ ID NO: 3864 - protein, 125 aa, Artificial Sequence
  Description of Artificial Sequence: Synthetic polypeptide
MLLITSMLVLWMQLSQVNGQQVMQIPQYQHVQEGEDFTTYCNSSTTLSNIQWYKQRPGGHPVFLIQLVKSGEVKKQKRLTFQFGEAKKNSSLHITATQTTDVGTYFCAANTDKLIFGTGTRLQVF

SEQ ID NO: 3865 - protein, 126 aa, Artificial Sequence
  Description of Artificial Sequence: Synthetic polypeptide
MKKLLAMILWLQLDRLSGELKVEQNPLFLSMQEGKNYTIYCNYSTTSDRLYWYRQDPGKSLESLFVLLSNGAVKQEGRLMASLDTKARLSTLHITAAVHDLSATYFCAVDPLGPLTFGGGTRLMVK

SEQ ID NO: 3866 - protein, 130 aa, Artificial Sequence
  Description of Artificial Sequence: Synthetic polypeptide
METLLGLLILWLQLQWVSSKQEVTQIPAALSVPEGENLVLNCSFTDSAIYNLQWFRQDPGKGLTSLLLIQSSQREQTSGRLNASLDKSSGRSTLYIAASQPGDSATYLCAVSPGGSYIPTFGRGTSLIVH

SEQ ID NO: 3867 - protein, 140 aa, Artificial Sequence
  Description of Artificial Sequence: Synthetic polypeptide
MLLLLVPAFQVIFTLGGTRAQSVTQLDSQVPVFEEAPVELRCNYSSSVSVYLFWYVQYPNQGLQLLLKYLSGSTLVKGINGFEAEFNKSQTSFHLRKPSVHISDTAEYFCAVNRDDKIIFGKGTRLHILPNIQNPDPAVY

SEQ ID NO: 3868 - protein, 132 aa, Artificial Sequence
  Description of Artificial Sequence: Synthetic polypeptide
METLLGLLILWLQLQWVSSKQEVTQIPAALSVPEGENLVLNCSFTDSAIYNLQWFRQDPGKGLTSLLLIQSSQREQTSGRLNASLDKSSGRSTLYIAASQPGDSATYLCAVHDRGSTLGRLYFGRGTQLTVW

SEQ ID NO: 3869 - protein, 130 aa, Artificial Sequence
  Description of Artificial Sequence: Synthetic polypeptide
MMKSLRVLLVILWLQLSWVWSQQKEVEQDPGPLSVPEGAIVSLNCTYSNSAFQYFMWYRQYSRKGPELLMYTYSSGNKEDGRFTAQVDKSSKYISLFIRDSQPSDSATYLCAMIGRGKLIFGQGTELSVK

SEQ ID NO: 3870 - protein, 130 aa, Artificial Sequence
  Description of Artificial Sequence: Synthetic polypeptide
MISLRVLLVILWLQLSWVWSQRKEVEQDPGPFNVPEGATVAFNCTYSNSASQSFFWYRQDCRKEPKLLMSVYSSGNEDGRFTAQLNRASQYISLLIRDSKLSDSATYLCVVNGEYGNKLVFGAGTILRVK

SEQ ID NO: 3871 - protein, 126 aa, Artificial Sequence
  Description of Artificial Sequence: Synthetic polypeptide
MKRILGALLGLLSAQVCCVRGIQVEQSPPDLILQEGANSTLRCNFSDSVNNLQWFHQNPWGQLINLFYIPSGTKQNGRLSATTVATERYSLLYISSSQTTDSGVYFCAVEVNARLMFGDGTQLVVK

SEQ ID NO: 3872 - protein, 125 aa, Artificial Sequence
  Description of Artificial Sequence: Synthetic polypeptide
MWGVFLLYVSMKMGGTTGQNIDQPTEMTATEGAIVQINCTYQTSGFNGLFWYQQHAGEAPTFLSYNVLDGLEEKGRFSSFLSRSKGYSYLLLKELQMKDSASYLCAVRDRDARLMFGDGTQLVVK

SEQ ID NO: 3873 - protein, 127 aa, Artificial Sequence
  Description of Artificial Sequence: Synthetic polypeptide
MWGVFLLYVSMKMGGTTGQNIDQPTEMTATEGAIVQINCTYQTSGFNGLFWYQQHAGEAPTFLSYNVLDGLEEKGRFSSFLSRSKGYSYLLLKELQMKDSASYLCAVRDRTGRRALTFGSGTRLQVQ

SEQ ID NO: 3874 - protein, 129 aa, Artificial Sequence
  Description of Artificial Sequence: Synthetic polypeptide
MKPTLISVLVIIFILRGTRAQRVTQPEKLLSVFKGAPVELKCNYSYSGSPELFWYVQYSRQRLQLLLRHISRESIKGFTADLNKGETSFHLKKPFAQEEDSAMYYCALLDSGAGSYQLTFGKGTKLSVI

SEQ ID NO: 3875 - protein, 140 aa, Artificial Sequence
  Description of Artificial Sequence: Synthetic polypeptide
MTSIRAVFIFLWLQLDLVNGENVEQHPSTLSVQEGDSAVIKCTYSDSASNYFPWYKQELGKGPQLIIDIRSNVGEKKDQRIAVTLNKTAKHFSLHITETQPEDSAVYFCAAWASSYKLIFGSGTRLLVRPDIQNPDPAVY

SEQ ID NO: 3876 - protein, 134 aa, Artificial Sequence
  Description of Artificial Sequence: Synthetic polypeptide
METLLGVSLVILWLQLARVNSQQGEEDPQALSIQEGENATMNCSYKTSINNLQWYRQNSGRGLVHLILIRSNEREKHSGRLRVTLDTSKKSSSLLITASRAADTASYFCATGSNAGGTSYGKLTFGQGTILTVH

SEQ ID NO: 3877 - protein, 131 aa, Artificial Sequence
  Description of Artificial Sequence: Synthetic polypeptide
MMKCPQALLAIFWLLLSWVSSEDKVVQSPLSLVVHEGDTVTLNCSYEVTNFRSLLWYKQEKKAPTFLFMLTSSGIEKKSGRLSSILDKKELFSILNITATQTGDSAVYLCAVGGYTGNQFYFGTGTSLTVI

SEQ ID NO: 3878 - protein, 130 aa, Artificial Sequence
  Description of Artificial Sequence: Synthetic polypeptide
MMKSLRVLLVILWLQLSWVWSQQKEVEQDPGPLSVPEGAIVSLNCTYSNSAFQYFMWYRQYSRKGPELLMYTYSSGNKEDGRFTAQVDKSSKYISLFIRDSQPSDSATYLCAKTSGSRLTFGEGTQLTVN

SEQ ID NO: 3879 - protein, 131 aa, Artificial Sequence
  Description of Artificial Sequence: Synthetic polypeptide
MKPTLISVLVIIFILRGTRAQRVTQPEKLLSVFKGAPVELKCNYSYSGSPELFWYVQYSRQRLQLLLRHISRESIKGFTADLNKGETSFHLKKPFAQEEDSAMYYCALSGPDRGSTLGRLYFGRGTQLTVW

SEQ ID NO: 3880 - protein, 142 aa, Artificial Sequence
  Description of Artificial Sequence: Synthetic polypeptide
MKSLRVLLVILWLQLSWVWSQQKEVEQNSGPLSVPEGAIASLNCTYSDRGSQSFFWYRQYSGKSPELIMFIYSNGDKEDGRFTAQLNKASQYVSLLIRDSQPSDSATYLCAVNMRGNEKLTFGTGTRLTIIPNIQNPDPAVY

SEQ ID NO: 3881 - protein, 149 aa, Artificial Sequence
  Description of Artificial Sequence: Synthetic polypeptide
MAMLLGASVLILWLQPDWVNSQQKNDDQQVKQNSPSLSVQEGRISILNCDYTNSMFDYFLWYKKYPAEGPTFLISISSIKDKNEDGRFTVFLNKSAKHLSLHIVPSQPGDSAVYFCAASGGSNTGKLIFGQGTTLQVKPDIQNPDPAVY

SEQ ID NO: 3882 - protein, 131 aa, Artificial Sequence
  Description of Artificial Sequence: Synthetic polypeptide
MKSLRVLLVILWLQLSWVWSQQKEVEQNSGPLSVPEGAIASLNCTYSDRGSQSFFWYRQYSGKSPELIMFIYSNGDKEDGRFTAQLNKASQYVSLLIRDSQPSDSATYLCAVRGGGSYIPTFGRGTSLIVH

SEQ ID NO: 3883 - protein, 131 aa, Artificial Sequence
  Description of Artificial Sequence: Synthetic polypeptide
MISLRVLLVILWLQLSWVWSQRKEVEQDPGPFNVPEGATVAFNCTYSNSASQSFFWYRQDCRKEPKLLMSVYSSGNEDGRFTAQLNRASQYISLLIRDSKLSDSATYLCVVTTGGSQGNLIFGKGTKLSVK

SEQ ID NO: 3884 - protein, 127 aa, Artificial Sequence
  Description of Artificial Sequence: Synthetic polypeptide
MWGAFLLYVSMKMGGTAGQSLEQPSEVTAVEGAIVQINCTYQTSGFYGLSWYQQHDGGAPTFLSYNALDGLEETGRFSSFLSRSDSYGYLLLQELQMKDSASYFCAVINTGQGGKLIFGQGTELSVK

SEQ ID NO: 3885 - protein, 137 aa, Artificial Sequence
  Description of Artificial Sequence: Synthetic polypeptide
MTRVSLLWAVVVSTCLESGMAQTVTQSQPEMSVQEAETVTLSCTYDTSENNYYLFWYKQPPSRQMILVIRQEAYKQQNATENRFSVNFQKAAKSFSLKISDSQLGDTAMYFCAFMFAYSGAGSYQLTFGKGTKLSVI

SEQ ID NO: 3886 - protein, 133 aa, Artificial Sequence
  Description of Artificial Sequence: Synthetic polypeptide
MLLLLVPAFQVIFTLGGTRAQSVTQLDSQVPVFEEAPVELRCNYSSSVSVYLFWYVQYPNQGLQLLLKYLSGSTLVKGINGFEAEFNKSQTSFHLRKPSVHISDTAEYFCAVRSYGGSQGNLIFGKGTKLSVK

SEQ ID NO: 3887 - protein, 125 aa, Artificial Sequence
  Description of Artificial Sequence: Synthetic polypeptide
MNSSLDFLILILMFGGTSSNSVKQTGQITVSEGASVTMNCTYTSTGYPTLFWYVEYPSKPLQLLQRETMENSKNFGGGNIKDKNSPIVKYSVQVSDSAVYYCLLGGSGGATNKLIFGTGTLLAVQ

SEQ ID NO: 3888 - protein, 134 aa, Artificial Sequence
  Description of Artificial Sequence: Synthetic polypeptide
MKTFAGFSFLFLWLQLDCMSRGEDVEQSLFLSVREGDSSVINCTYTDSSSTYLYWYKQEPGAGLQLLTYIFSNMDMKQDQRLTVLLNKKDKHLSLRIADTQTGDSAIYFCAEILPMDTGRRALTFGSGTRLQVQ

SEQ ID NO: 3889 - protein, 131 aa, Artificial Sequence
  Description of Artificial Sequence: Synthetic polypeptide
MISLRVLLVILWLQLSWVWSQRKEVEQDPGPFNVPEGATVAFNCTYSNSASQSFFWYRQDCRKEPKLLMSVYSSGNEDGRFTAQLNRASQYISLLIRDSKLSDSATYLCVVNEYSGTYKYIFGTGTRLKVL

SEQ ID NO: 3890 - protein, 132 aa, Artificial Sequence
  Description of Artificial Sequence: Synthetic polypeptide
MAGIRALFMYLWLQLDWVSRGESVGLHLPTLSVQEGDNSIINCAYSNSASDYFIWYKQESGKGPQFIIDIRSNMDKRQGQRVTVLLNKTVKHLSLQIAATQPGDSAVYFCAENSGGSNYKLTFGKGTLLTVN

SEQ ID NO: 3891 - protein, 146 aa, Artificial Sequence
  Description of Artificial Sequence: Synthetic polypeptide
MKSLRVLLVILWLQLSWVWSQQKEVEQNSGPLSVPEGAIASLNCTYSDRGSQSFFWYRQYSGKSPELIMFIYSNGDKEDGRFTAQLNKASQYVSLLIRDSQPSDSATYLCAVTAYISNFGNEKLTFGTGTRLTIIPNIQNPDPAVY

SEQ ID NO: 3892 - protein, 143 aa, Artificial Sequence
  Description of Artificial Sequence: Synthetic polypeptide
MMKSLRVLLVILWLQLSWVWSQQKEVEQDPGPLSVPEGAIVSLNCTYSNSAFQYFMWYRQYSRKGPELLMYTYSSGNKEDGRFTAQVDKSSKYISLFIRDSQPSDSATYLCATFKQAGTALIFGKGTTLSVSSNIQNPDPAVY

SEQ ID NO: 3893 - protein, 133 aa, Artificial Sequence
  Description of Artificial Sequence: Synthetic polypeptide
MMKSLRVLLVILWLQLSWVWSQQKEVEQDPGPLSVPEGAIVSLNCTYSNSAFQYFMWYRQYSRKGPELLMYTYSSGNKEDGRFTAQVDKSSKYISLFIRDSQPSDSATYLCAMSASNQGGKLIFGQGTELSVK

SEQ ID NO: 3894 - protein, 133 aa, Artificial Sequence
  Description of Artificial Sequence: Synthetic polypeptide
MAGIRALFMYLWLQLDWVSRGESVGLHLPTLSVQEGDNSIINCAYSNSASDYFIWYKQESGKGPQFIIDIRSNMDKRQGQRVTVLLNKTVKHLSLQIAATQPGDSAVYFCAENSLNTGGFKTIFGAGTRLFVK

SEQ ID NO: 3895 - protein, 143 aa, Artificial Sequence
  Description of Artificial Sequence: Synthetic polypeptide
METLLGLLILWLQLQWVSSKQEVTQIPAALSVPEGENLVLNCSFTDSAIYNLQWFRQDPGKGLTSLLLIQSSQREQTSGRLNASLDKSSGRSTLYIAASQPGDSATYLCAVRGSGGGADGLTFGKGTHLIIQPYIQNPDPAVY

SEQ ID NO: 3896 - protein, 126 aa, Artificial Sequence
  Description of Artificial Sequence: Synthetic polypeptide
MLLITSMLVLWMQLSQVNGQQVMQIPQYQHVQEGEDFTTYCNSSTTLSNIQWYKQRPGGHPVFLIQLVKSGEVKKQKRLTFQFGEAKKNSSLHITATQTTDVGTYFCAGTDNARLMFGDGTQLVVK

SEQ ID NO: 3897 - protein, 144 aa, Artificial Sequence
  Description of Artificial Sequence: Synthetic polypeptide
METVLQVLLGILGFQAAWVSSQELEQSPQSLIVQEGKNLTINCTSSKTLYGLYWYKQKYGEGLIFLMMLQKGGEEKSHEKITAKLDEKKQQSSLHITASQPSHAGIYLCGAFRTGSSNTGKLIFGQGTTLQVKPDIQNPDPAVY

SEQ ID NO: 3898 - protein, 127 aa, Artificial Sequence
  Description of Artificial Sequence: Synthetic polypeptide
MWGVFLLYVSMKMGGTTGQNIDQPTEMTATEGAIVQINCTYQTSGFNGLFWYQQHAGEAPTFLSYNVLDGLEEKGRFSSFLSRSKGYSYLLLKELQMKDSASYLCAVRGNTGGFKTIFGAGTRLFVK

SEQ ID NO: 3899 - protein, 130 aa, Artificial Sequence
  Description of Artificial Sequence: Synthetic polypeptide
METLLGLLILWLQLQWVSSKQEVTQIPAALSVPEGENLVLNCSFTDSAIYNLQWFRQDPGKGLTSLLLIQSSQREQTSGRLNASLDKSSGRSTLYIAASQPGDSATYLCAVLQTGANNLFFGTGTRLTVI

SEQ ID NO: 3900 - protein, 130 aa, Artificial Sequence
  Description of Artificial Sequence: Synthetic polypeptide
MISLRVLLVILWLQLSWVWSQRKEVEQDPGPFNVPEGATVAFNCTYSNSASQSFFWYRQDCRKEPKLLMSVYSSGNEDGRFTAQLNRASQYISLLIRDSKLSDSATYLCVVNMGDTDKLIFGTGTRLQVF

SEQ ID NO: 3901 - protein, 141 aa, Artificial Sequence
  Description of Artificial Sequence: Synthetic polypeptide
MISLRVLLVILWLQLSWVWSQRKEVEQDPGPFNVPEGATVAFNCTYSNSASQSFFWYRQDCRKEPKLLMSVYSSGNEDGRFTAQLNRASQYISLLIRDSKLSDSATYLCVVNHGYGQNFVFGPGTRLSVLPYIQNPDPAVY

SEQ ID NO: 3902 - protein, 129 aa, Artificial Sequence
  Description of Artificial Sequence: Synthetic polypeptide
METLLGVSLVILWLQLARVNSQQGEEDPQALSIQEGENATMNCSYKTSINNLQWYRQNSGRGLVHLILIRSNEREKHSGRLRVTLDTSKKSSSLLITASRAADTASYFCAILTGANNLFFGTGTRLTVI

SEQ ID NO: 3903 - protein, 127 aa, Artificial Sequence
  Description of Artificial Sequence: Synthetic polypeptide
METLLGLLILWLQLQWVSSKQEVTQIPAALSVPEGENLVLNCSFTDSAIYNLQWFRQDPGKGLTSLLLIQSSQREQTSGRLNASLDKSSGRSTLYIAASQPGDSATYLCAATGNQFYFGTGTSLTVI

SEQ ID NO: 3904 - protein, 143 aa, Artificial Sequence
  Description of Artificial Sequence: Synthetic polypeptide
MISLRVLLVILWLQLSWVWSQRKEVEQDPGPFNVPEGATVAFNCTYSNSASQSFFWYRQDCRKEPKLLMSVYSSGNEDGRFTAQLNRASQYISLLIRDSKLSDSATYLCVVNHYSGGYQKVTFGTGTKLQVIPNIQNPDPAVY

SEQ ID NO: 3905 - protein, 132 aa, Artificial Sequence
  Description of Artificial Sequence: Synthetic polypeptide
MEKNPLAAPLLILWFHLDCVSSILNVEQSPQSLHVQEGDSTNFTCSFPSSNFYALHWYRWETAKSPEALFVMTLNGDEKKKGRISATLNTKEGYSYLYIKGSQPEDSATYLCAFLYGNNRLAFGKGNQVVVI

SEQ ID NO: 3906 - protein, 129 aa, Artificial Sequence
  Description of Artificial Sequence: Synthetic polypeptide
MAGIRALFMYLWLQLDWVSRGESVGLHLPTLSVQEGDNSIINCAYSNSASDYFIWYKQESGKGPQFIIDIRSNMDKRQGQRVTVLLNKTVKHLSLQIAATQPGDSAVYFCAEKTGNQFYFGTGTSLTVI

SEQ ID NO: 3907 - protein, 129 aa, Artificial Sequence
  Description of Artificial Sequence: Synthetic polypeptide
MISLRVLLVILWLQLSWVWSQRKEVEQDPGPFNVPEGATVAFNCTYSNSASQSFFWYRQDCRKEPKLLMSVYSSGNEDGRFTAQLNRASQYISLLIRDSKLSDSATYLCVAYNAGNMLTFGGGTRLMVK

SEQ ID NO: 3908 - protein, 139 aa, Artificial Sequence
  Description of Artificial Sequence: Synthetic polypeptide
MKLVTSITVLLSLGIMGDAKTTQPNSMESNEEEPVHLPCNHSTISGTDYIHWYRQLPSQGPEYVIHGLTSNVNNRMASLAIAEDRKSSTLILHRATLRDAAVYYCILRDFMNRDDKIIFGKGTRLHILPNIQNPDPAVY

SEQ ID NO: 3909 - protein, 142 aa, Artificial Sequence
  Description of Artificial Sequence: Synthetic polypeptide
MEKMLECAFIVLWLQLGWLSGEDQVTQSPEALRLQEGESSSLNCSYTVSGLRGLFWYRQDPGKGPEFLFTLYSAGEEKEKERLKATLTKKESFLHITAPKPEDSATYLCAVQARGGADGLTFGKGTHLIIQPYIQNPDPAVY

SEQ ID NO: 3910 - protein, 128 aa, Artificial Sequence
  Description of Artificial Sequence: Synthetic polypeptide
METLLGLLILWLQLQWVSSKQEVTQIPAALSVPEGENLVLNCSFTDSAIYNLQWFRQDPGKGLTSLLLIQSSQREQTSGRLNASLDKSSGRSTLYIAASQPGDSATYLCAVQWDARLMFGDGTQLVVK

SEQ ID NO: 3911 - protein, 143 aa, Artificial Sequence
  Description of Artificial Sequence: Synthetic polypeptide
MACPGFLWALVISTCLEFSMAQTVTQSQPEMSVQEAETVTLSCTYDTSESDYYLFWYKQPPSRQMILVIRQEAYKQQNATENRFSVNFQKAAKSFSLKISDSQLGDAAMYFCAYRGYNEKLTFGTGTRLTIIPNIQNPDPAVY

SEQ ID NO: 3912 - protein, 139 aa, Artificial Sequence
  Description of Artificial Sequence: Synthetic polypeptide
MLLITSMLVLWMQLSQVNGQQVMQIPQYQHVQEGEDFTTYCNSSTTLSNIQWYKQRPGGHPVFLIQLVKSGEVKKQKRLTFQFGEAKKNSSLHITATQTTDVGTYFCAGSNQAGTALIFGKGTTLSVSSNIQNPDPAVY

SEQ ID NO: 3913 - protein, 128 aa, Artificial Sequence
  Description of Artificial Sequence: Synthetic polypeptide
METLLGLLILWLQLQWVSSKQEVTQIPAALSVPEGENLVLNCSFTDSAIYNLQWFRQDPGKGLTSLLLIQSSQREQTSGRLNASLDKSSGRSTLYIAASQPGDSATYLCAVYDGNQFYFGTGTSLTVI

SEQ ID NO: 3914 - protein, 140 aa, Artificial Sequence
  Description of Artificial Sequence: Synthetic polypeptide
METLLGLLILWLQLQWVSSKQEVTQIPAALSVPEGENLVLNCSFTDSAIYNLQWFRQDPGKGLTSLLLIQSSQREQTSGRLNASLDKSSGRSTLYIAASQPGDSATYLCAVRDSSYKLIFGSGTRLLVRPDIQNPDPAVY

SEQ ID NO: 3915 - protein, 124 aa, Artificial Sequence
  Description of Artificial Sequence: Synthetic polypeptide
MACPGFLWALVISTCLEFSMAQTVTQSQPEMSVQEAETVTLSCTYDTSESDYYLFWYKQPPSRQMILVIRQEAYKQQNATENRFSVNFQKAAKSFSLKISDSQLGDAAMYFCAPAIQGAQKLVF

SEQ ID NO: 3916 - protein, 131 aa, Artificial Sequence
  Description of Artificial Sequence: Synthetic polypeptide
METLLGVSLVILWLQLARVNSQQGEEDPQALSIQEGENATMNCSYKTSINNLQWYRQNSGRGLVHLILIRSNEREKHSGRLRVTLDTSKKSSSLLITASRAADTASYFCATDGGTSYGKLTFGQGTILTVH

SEQ ID NO: 3917 - protein, 132 aa, Artificial Sequence
  Description of Artificial Sequence: Synthetic polypeptide
METLLGLLILWLQLQWVSSKQEVTQIPAALSVPEGENLVLNCSFTDSAIYNLQWFRQDPGKGLTSLLLIQSSQREQTSGRLNASLDKSSGRSTLYIAASQPGDSATYLCAVAYSGAGSYQLTFGKGTKLSVI

SEQ ID NO: 3918 - protein, 130 aa, Artificial Sequence
  Description of Artificial Sequence: Synthetic polypeptide
METLLGLLILWLQLQWVSSKQEVTQIPAALSVPEGENLVLNCSFTDSAIYNLQWFRQDPGKGLTSLLLIQSSQREQTSGRLNASLDKSSGRSTLYIAASQPGDSATYLCAVRKNNNARLMFGDGTQLVVK

SEQ ID NO: 3919 - protein, 129 aa, Artificial Sequence
  Description of Artificial Sequence: Synthetic polypeptide
METLLGLLILWLQLQWVSSKQEVTQIPAALSVPEGENLVLNCSFTDSAIYNLQWFRQDPGKGLTSLLLIQSSQREQTSGRLNASLDKSSGRSTLYIAASQPGDSATYLCAVRNSNYQLIWGAGTKLIIK

SEQ ID NO: 3920 - protein, 130 aa, Artificial Sequence
  Description of Artificial Sequence: Synthetic polypeptide
MISLRVLLVILWLQLSWVWSQRKEVEQDPGPFNVPEGATVAFNCTYSNSASQSFFWYRQDCRKEPKLLMSVYSSGNEDGRFTAQLNRASQYISLLIRDSKLSDSATYLCVVNAYNNNDMRFGAGTRLTVK

SEQ ID NO: 3921 - protein, 128 aa, Artificial Sequence
  Description of Artificial Sequence: Synthetic polypeptide
METLLGLLILWLQLQWVSSKQEVTQIPAALSVPEGENLVLNCSFTDSAIYNLQWFRQDPGKGLTSLLLIQSSQREQTSGRLNASLDKSSGRSTLYIAASQPGDSATYLCAVYPGYALNFGKGTSLLVT

SEQ ID NO: 3922 - protein, 134 aa, Artificial Sequence
  Description of Artificial Sequence: Synthetic polypeptide
MLTASLLRAVIASICVVSSMAQKVTQAQTEISVVEKEDVTLDCVYETRDTTYYLFWYKQPPSGELVFLIRRNSFDEQNEISGRYSWNFQKSTSSFNFTITASQVVDSAVYFCALSRTSGTYKYIFGTGTRLKVL

SEQ ID NO: 3923 - protein, 134 aa, Artificial Sequence
  Description of Artificial Sequence: Synthetic polypeptide
MKSLRVLLVILWLQLSWVWSQQKEVEQNSGPLSVPEGAIASLNCTYSDRGSQSFFWYRQYSGKSPELIMFIYSNGDKEDGRFTAQLNKASQYVSLLIRDSQPSDSATYLCAVISAGGTSYGKLTFGQGTILTVH

SEQ ID NO: 3924 - protein, 129 aa, Artificial Sequence
  Description of Artificial Sequence: Synthetic polypeptide
MRLVARVTVFLTFGTIIDAKTTQPTSMDCAEGRAANLPCNHSTISGNEYVYWYRQIHSQGPQYIIHGLKNNETNEMASLIITEDRKSSTLILPHATLRDTAVYYCIVRFLTQGGSEKLVFGKGTKLTVN

SEQ ID NO: 3925 - protein, 130 aa, Artificial Sequence
  Description of Artificial Sequence: Synthetic polypeptide
MLLLLVPVLEVIFTLGGTRAQSVTQLGSHVSVSEGALVLLRCNYSSSVPPYLFWYVQYPNQGLQLLLKYTSAATLVKGINGFEAEFKKSETSFHLTKPSAHMSDAAEYFCAVSDGTDKLIFGTGTRLQVF

SEQ ID NO: 3926 - protein, 137 aa, Artificial Sequence
  Description of Artificial Sequence: Synthetic polypeptide
MLTASLLRAVIASICVVSSMAQKVTQAQTEISVVEKEDVTLDCVYETRDTTYYLFWYKQPPSGELVFLIRRNSFDEQNEISGRYSWNFQKSTSSFNFTITASQVVDSAVYFCALSEADYGGATNKLIFGTGTLLAVQ

SEQ ID NO: 3927 - protein, 129 aa, Artificial Sequence
  Description of Artificial Sequence: Synthetic polypeptide
METLLGLLILWLQLQWVSSKQEVTQIPAALSVPEGENLVLNCSFTDSAIYNLQWFRQDPGKGLTSLLLIQSSQREQTSGRLNASLDKSSGRSTLYIAASQPGDSATYLCAVRGGSYIPTFGRGTSLIVH

SEQ ID NO: 3928 - protein, 131 aa, Artificial Sequence
  Description of Artificial Sequence: Synthetic polypeptide
MAGIRALFMYLWLQLDWVSRGESVGLHLPTLSVQEGDNSIINCAYSNSASDYFIWYKQESGKGPQFIIDIRSNMDKRQGQRVTVLLNKTVKHLSLQIAATQPGDSAVYFCAETDSGNTPLVFGKGTRLSVI

SEQ ID NO: 3929 - protein, 146 aa, Artificial Sequence
  Description of Artificial Sequence: Synthetic polypeptide
MSLSSLLKVVTASLWLGPGIAQKITQTQPGMFVQEKEAVTLDCTYDTSDQSYGLFWYKQPSSGEMIFLIYQGSYDEQNATEGRYSLNFQKARKSTNLVISASQLGDSAMYFCAMREGRNYGQNFVFGPGTRLSVLPYIQNPDPAVY

SEQ ID NO: 3930 - protein, 130 aa, Artificial Sequence
  Description of Artificial Sequence: Synthetic polypeptide
MLLEHLLIILWMQLTWVSGQQLNQSPQSMFIQEGEDVSMNCTSSSIFNTWLWYKQDPGEGPVLLIALYKAGELTSNGRLTAQFGITRKDSFLNISASIPSDVGIYFCAGQLISGTASKLTFGTGTRLQVT

SEQ ID NO: 3931 - protein, 132 aa, Artificial Sequence
  Description of Artificial Sequence: Synthetic polypeptide
METLLGLLILWLQLQWVSSKQEVTQIPAALSVPEGENLVLNCSFTDSAIYNLQWFRQDPGKGLTSLLLIQSSQREQTSGRLNASLDKSSGRSTLYIAASQPGDSATYLCAVRKTTDSWGKLQFGAGTQVVVT

SEQ ID NO: 3932 - protein, 127 aa, Artificial Sequence
  Description of Artificial Sequence: Synthetic polypeptide
MLLITSMLVLWMQLSQVNGQQVMQIPQYQHVQEGEDFTTYCNSSTTLSNIQWYKQRPGGHPVFLIQLVKSGEVKKQKRLTFQFGEAKKNSSLHITATQTTDVGTYFCAGPYNFNKFYFGSGTKLNVK

SEQ ID NO: 3933 - protein, 130 aa, Artificial Sequence
  Description of Artificial Sequence: Synthetic polypeptide
MASAPISMLAMLFTLSGLRAQSVAQPEDQVNVAEGNPLTVKCTYSVSGNPYLFWYVQYPNRGLQFLLKYITGDNLVKGSYGFEAEFNKSQTSFHLKKPSALVSDSALYFCAVTGGANNLFFGTGTRLTVI

SEQ ID NO: 3934 - protein, 129 aa, Artificial Sequence
  Description of Artificial Sequence: Synthetic polypeptide
MKLVTSITVLLSLGIMGDAKTTQPNSMESNEEEPVHLPCNHSTISGTDYIHWYRQLPSQGPEYVIHGLTSNVNNRMASLAIAEDRKSSTLILHRATLRDAAVYYCILRDAGGTSYGKLTFGQGTILTVH

SEQ ID NO: 3935 - protein, 133 aa, Artificial Sequence
  Description of Artificial Sequence: Synthetic polypeptide
MLLLLVPAFQVIFTLGGTRAQSVTQLDSQVPVFEEAPVELRCNYSSSVSVYLFWYVQYPNQGLQLLLKYLSGSTLVKGINGFEAEFNKSQTSFHLRKPSVHISDTAEYFCAVRGATSGTYKYIFGTGTRLKVL

SEQ ID NO: 3936 - protein, 132 aa, Artificial Sequence
  Description of Artificial Sequence: Synthetic polypeptide
METLLGLLILWLQLQWVSSKQEVTQIPAALSVPEGENLVLNCSFTDSAIYNLQWFRQDPGKGLTSLLLIQSSQREQTSGRLNASLDKSSGRSTLYIAASQPGDSATYLCAVVEYGGSQGNLIFGKGTKLSVK

SEQ ID NO: 3937 - protein, 132 aa, Artificial Sequence
  Description of Artificial Sequence: Synthetic polypeptide
MISLRVLLVILWLQLSWVWSQRKEVEQDPGPFNVPEGATVAFNCTYSNSASQSFFWYRQDCRKEPKLLMSVYSSGNEDGRFTAQLNRASQYISLLIRDSKLSDSATYLCVVTTGGGATNKLIFGTGTLLAVQ

SEQ ID NO: 3938 - protein, 135 aa, Artificial Sequence
  Description of Artificial Sequence: Synthetic polypeptide
MEKNPLAAPLLILWFHLDCVSSILNVEQSPQSLHVQEGDSTNFTCSFPSSNFYALHWYRWETAKSPEALFVMTLNGDEKKKGRISATLNTKEGYSYLYIKGSQPEDSATYLCARSSTTDSWGKLQFGAGTQVVVT

SEQ ID NO: 3939 - protein, 141 aa, Artificial Sequence
  Description of Artificial Sequence: Synthetic polypeptide
MISLRVLLVILWLQLSWVWSQRKEVEQDPGPFNVPEGATVAFNCTYSNSASQSFFWYRQDCRKEPKLLMSVYSSGNEDGRFTAQLNRASQYISLLIRDSKLSDSATYLCVVNLHYGQNFVFGPGTRLSVLPYIQNPDPAVY

SEQ ID NO: 3940 - protein, 129 aa, Artificial Sequence
  Description of Artificial Sequence: Synthetic polypeptide
METLLGLLILWLQLQWVSSKQEVTQIPAALSVPEGENLVLNCSFTDSAIYNLQWFRQDPGKGLTSLLLIQSSQREQTSGRLNASLDKSSGRSTLYIAASQPGDSATYLCAVTPGNARLMFGDGTQLVVK

SEQ ID NO: 3941 - protein, 129 aa, Artificial Sequence
  Description of Artificial Sequence: Synthetic polypeptide
MKKLLAMILWLQLDRLSGELKVEQNPLFLSMQEGKNYTIYCNYSTTSDRLYWYRQDPGKSLESLFVLLSNGAVKQEGRLMASLDTKARLSTLHITAAVHDLSATYFCAVDGMDSNYQLIWGAGTKLIIK

SEQ ID NO: 3942 - protein, 134 aa, Artificial Sequence
  Description of Artificial Sequence: Synthetic polypeptide
MASAPISMLAMLFTLSGLRAQSVAQPEDQVNVAEGNPLTVKCTYSVSGNPYLFWYVQYPNRGLQFLLKYITGDNLVKGSYGFEAEFNKSQTSFHLKKPSALVSDSALYFCAVRGHNAGNNRKLIWGLGTSLAVN

SEQ ID NO: 3943 - protein, 130 aa, Artificial Sequence
  Description of Artificial Sequence: Synthetic polypeptide
MKKHLTTFLVILWLYFYRGNGKNQVEQSPQSLIILEGKNCTLQCNYTVSPFSNLRWYKQDTGRGPVSLTIMTFSENTKSNGRYTATLDADTKQSSLHITASQLSDSASYICVFDSNYQLIWGAGTKLIIK

SEQ ID NO: 3944 - protein, 138 aa, Artificial Sequence
  Description of Artificial Sequence: Synthetic polypeptide
METLLGLLILWLQLQWVSSKQEVTQIPAALSVPEGENLVLNCSFTDSAIYNLQWFRQDPGKGLTSLLLIQSSQREQTSGRLNASLDKSSGRSTLYIAASQPGDSATYLCVLNDYKLSFGAGTTVTVRSNIQNPDPAVY

SEQ ID NO: 3945 - protein, 141 aa, Artificial Sequence
  Description of Artificial Sequence: Synthetic polypeptide
MTSIRAVFIFLWLQLDLVNGENVEQHPSTLSVQEGDSAVIKCTYSDSASNYFPWYKQELGKGPQLIIDIRSNVGEKKDQRIAVTLNKTAKHFSLHITETQPEDSAVYFCAAGSPNDYKLSFGAGTTVTVRSNIQNPDPAVY

SEQ ID NO: 3946 - protein, 136 aa, Artificial Sequence
  Description of Artificial Sequence: Synthetic polypeptide
MVLKFSVSILWIQLAWVSTQLLEQSPQFLSIQEGENLTVYCNSSSVFSSLQWYRQEPGEGPVLLVTVVTGGEVKKLKRLTFQFGDARKDSSLHITAAQPGDTGLYLCGGGADGLTFGKGTHLIIQPYIQNPDPAVY

SEQ ID NO: 3947 - protein, 134 aa, Artificial Sequence
  Description of Artificial Sequence: Synthetic polypeptide
METLLGLLILWLQLQWVSSKQEVTQIPAALSVPEGENLVLNCSFTDSAIYNLQWFRQDPGKGLTSLLLIQSSQREQTSGRLNASLDKSSGRSTLYIAASQPGDSATYLCAVTSADRGSTLGRLYFGRGTQLTVW

SEQ ID NO: 3948 - protein, 130 aa, Artificial Sequence
  Description of Artificial Sequence: Synthetic polypeptide
MKLVTSITVLLSLGIMGDAKTTQPNSMESNEEEPVHLPCNHSTISGTDYIHWYRQLPSQGPEYVIHGLTSNVNNRMASLAIAEDRKSSTLILHRATLRDAAVYYCILRGAYSGAGSYQLTFGKGTKLSVI

SEQ ID NO: 3949 - protein, 131 aa, Artificial Sequence
  Description of Artificial Sequence: Synthetic polypeptide
MAGIRALFMYLWLQLDWVSRGESVGLHLPTLSVQEGDNSIINCAYSNSASDYFIWYKQESGKGPQFIIDIRSNMDKRQGQRVTVLLNKTVKHLSLQIAATQPGDSAVYFCAEKREGTYKYIFGTGTRLKVL

SEQ ID NO: 3950 - protein, 136 aa, Artificial Sequence
  Description of Artificial Sequence: Synthetic polypeptide
MAGIRALFMYLWLQLDWVSRGESVGLHLPTLSVQEGDNSIINCAYSNSASDYFIWYKQESGKGPQFIIDIRSNMDKRQGQRVTVLLNKTVKHLSLQIAATQPGDSAVYFCAENKGRERKSSGDKLTFGTGTRLAVR

SEQ ID NO: 3951 - protein, 136 aa, Artificial Sequence
  Description of Artificial Sequence: Synthetic polypeptide
MWGVFLLYVSMKMGGTTGQNIDQPTEMTATEGAIVQINCTYQTSGFNGLFWYQQHAGEAPTFLSYNVLDGLEEKGRFSSFLSRSKGYSYLLLKELQMKDSASYLCAVRDRDYKLSFGAGTTVTVRSNIQNPDPAVY

SEQ ID NO: 3952 - protein, 135 aa, Artificial Sequence
  Description of Artificial Sequence: Synthetic polypeptide
MASAPISMLAMLFTLSGLRAQSVAQPEDQVNVAEGNPLTVKCTYSVSGNPYLFWYVQYPNRGLQFLLKYITGDNLVKGSYGFEAEFNKSQTSFHLKKPSALVSDSALYFCAVRLHPASGGSYIPTFGRGTSLIVH

SEQ ID NO: 3953 - protein, 131 aa, Artificial Sequence
  Description of Artificial Sequence: Synthetic polypeptide
MLLITSMLVLWMQLSQVNGQQVMQIPQYQHVQEGEDFTTYCNSSTTLSNIQWYKQRPGGHPVFLIQLVKSGEVKKQKRLTFQFGEAKKNSSLHITATQTTDVGTYFCAGQYLRGGATNKLIFGTGTLLAVQ

SEQ ID NO: 3954 - protein, 135 aa, Artificial Sequence
  Description of Artificial Sequence: Synthetic polypeptide
MLTASLLRAVIASICVVSSMAQKVTQAQTEISVVEKEDVTLDCVYETRDTTYYLFWYKQPPSGELVFLIRRNSFDEQNEISGRYSWNFQKSTSSFNFTITASQVVDSAVYFCALLSLRGSNYKLTFGKGTLLTVN

SEQ ID NO: 3955 - protein, 141 aa, Artificial Sequence
  Description of Artificial Sequence: Synthetic polypeptide
MISLRVLLVILWLQLSWVWSQRKEVEQDPGPFNVPEGATVAFNCTYSNSASQSFFWYRQDCRKEPKLLMSVYSSGNEDGRFTAQLNRASQYISLLIRDSKLSDSATYLCVVNLANDYKLSFGAGTTVTVRSNIQNPDPAVY

SEQ ID NO: 3956 - protein, 141 aa, Artificial Sequence
  Description of Artificial Sequence: Synthetic polypeptide
MISLRVLLVILWLQLSWVWSQRKEVEQDPGPFNVPEGATVAFNCTYSNSASQSFFWYRQDCRKEPKLLMSVYSSGNEDGRFTAQLNRASQYISLLIRDSKLSDSATYLCVVNMGDTDKLIFGTGTRLQVFPNIQNPDPAVY

SEQ ID NO: 3957 - protein, 125 aa, Artificial Sequence
  Description of Artificial Sequence: Synthetic polypeptide
MKLVTSITVLLSLGIMGDAKTTQPNSMESNEEEPVHLPCNHSTISGTDYIHWYRQLPSQGPEYVIHGLTSNVNNRMASLAIAEDRKSSTLILHRATLRDAAVYYCILRDGNNDMRFGAGTRLTVK

SEQ ID NO: 3958 - protein, 141 aa, Artificial Sequence
  Description of Artificial Sequence: Synthetic polypeptide
MLLLLVPAFQVIFTLGGTRAQSVTQLDSQVPVFEEAPVELRCNYSSSVSVYLFWYVQYPNQGLQLLLKYLSGSTLVKGINGFEAEFNKSQTSFHLRKPSVHISDTAEYFCAVSPNDYKLSFGAGTTVTVRSNIQNPDPAVY

SEQ ID NO: 3959 - protein, 134 aa, Artificial Sequence
  Description of Artificial Sequence: Synthetic polypeptide
MASAPISMLAMLFTLSGLRAQSVAQPEDQVNVAEGNPLTVKCTYSVSGNPYLFWYVQYPNRGLQFLLKYITGDNLVKGSYGFEAEFNKSQTSFHLKKPSALVSDSALYFCAVRADRGSTLGRLYFGRGTQLTVW

SEQ ID NO: 3960 - protein, 131 aa, Artificial Sequence
  Description of Artificial Sequence: Synthetic polypeptide
METLLGLLILWLQLQWVSSKQEVTQIPAALSVPEGENLVLNCSFTDSAIYNLQWFRQDPGKGLTSLLLIQSSQREQTSGRLNASLDKSSGRSTLYIAASQPGDSATYLCAVSPASGTYKYIFGTGTRLKVL

SEQ ID NO: 3961 - protein, 143 aa, Artificial Sequence
  Description of Artificial Sequence: Synthetic polypeptide
MALQSTLGAVWLGLLLNSLWKVAESKDQVFQPSTVASSEGAVVEIFCNHSVSNAYNFFWYLHFPGCAPRLLVKGSKPSQQGRYNMTYERFSSSLLILQVREADAAVYYCAVEGVTGGGNKLTFGTGTQLKVELNIQNPDPAVY

SEQ ID NO: 3962 - protein, 129 aa, Artificial Sequence
  Description of Artificial Sequence: Synthetic polypeptide
MLLLLLLLGPGSGLGAVVSQHPSWVICKSGTSVKIECRSLDFQATTMFWYRQFPKQSLMLMATSNEGSKATYEQGVEKDKFLINHASLTLSTLTVTSAHPEDSSFYICSASGREDYGYTFGSGTRLTVV

SEQ ID NO: 3963 - protein, 129 aa, Artificial Sequence
  Description of Artificial Sequence: Synthetic polypeptide
MLLLLLLLGPGSGLGAVVSQHPSWVICKSGTSVKIECRSLDFQATTMFWYRQFPKQSLMLMATSNEGSKATYEQGVEKDKFLINHASLTLSTLTVTSAHPEDSSFYICSARDRGSYEQYFGPGTRLTVT

SEQ ID NO: 3964 - protein, 138 aa, Artificial Sequence
  Description of Artificial Sequence: Synthetic polypeptide
MRSWPGPEMGTRLFFYVALCLLWTGHVDAGITQSPRHKVTETGTPVTLRCHQTENHRYMYWYRQDPGHGLRLIHYSYGVKDTDKGEVSDGYSVSRSKTEDFLLTLESATSSQTSVYFCAISDPSLEAFFGQGTRLTVV

SEQ ID NO: 3965 - protein, 136 aa, Artificial Sequence
  Description of Artificial Sequence: Synthetic polypeptide
MGFRLLCCVAFCLLGAGPVDSGVTQTPKHLITATGQRVTLRCSPRSGDLSVYWYQQSLDQGLQFLIQYYNGEERAKGNILERFSAQQFPDLHSELNLSSLELGDSALYFCASSSYDRNGVASTEAFFGQGTRLTVV

SEQ ID NO: 3966 - protein, 137 aa, Artificial Sequence
  Description of Artificial Sequence: Synthetic polypeptide
MSIGLLCCVAFSLLWASPVNAGVTQTPKFQVLKTGQSMTLQCAQDMNHNSMYWYRQDPGMGLRLIYYSASEGTTDKGEVPNGYNVSRLNKREFSLRLESAAPSQTSVYFCASSEALWLAGPSYNEQFFGPGTRLTVL

SEQ ID NO: 3967 - protein, 137 aa, Artificial Sequence
  Description of Artificial Sequence: Synthetic polypeptide
MLLLLLLLGPGSGLGAVVSQHPSWVICKSGTSVKIECRSLDFQATTMFWYRQFPKQSLMLMATSNEGSKATYEQGVEKDKFLINHASLTLSTLTVTSAHPEDSSFYICSARPYQTFSGGTGPTDTQYFGPGTRLTVL

SEQ ID NO: 3968 - protein, 130 aa, Artificial Sequence
  Description of Artificial Sequence: Synthetic polypeptide
MGPGLLCWVLLCLLGAGSVETGVTQSPTHLIKTRGQQVTLRCSSQSGHNTVSWYQQALGQGPQFIFQYYREEENGRGNFPPRFSGLQFPNYSSELNVNALELDDSALYLCASSFGGNEQFFGPGTRLTVL

SEQ ID NO: 3969 - protein, 131 aa, Artificial Sequence
  Description of Artificial Sequence: Synthetic polypeptide
MGTRLLCWVAFCLLVEELIEAGVVQSPRYKIIEKKQPVAFWCNPISGHNTLYWYLQNLGQGPELLIRYENEEAVDDSQLPKDRFSAERLKGVDSTLKIQPAELGDSAVYLCASSPGGTEAFFGQGTRLTVV

SEQ ID NO: 3970 - protein, 131 aa, Artificial Sequence
  Description of Artificial Sequence: Synthetic polypeptide
MGSRLLCWVLLCLLGAGPVKAGVTQTPRYLIKTRGQQVTLSCSPISGHRSVSWYQQTPGQGLQFLFEYFSETQRNKGNFPGRFSGRQFSNSRSEMNVSTLELGDSALYLCASSSNRGDEAFFGQGTRLTVV

SEQ ID NO: 3971 - protein, 133 aa, Artificial Sequence
  Description of Artificial Sequence: Synthetic polypeptide
MGSRLLCWVLLCLLGAGPVKAGVTQTPRYLIKTRGQQVTLSCSPISGHRSVSWYQQTPGQGLQFLFEYFSETQRNKGNFPGRFSGRQFSNSRSEMNVSTLELGDSALYLCASSPGTGNTDTQYFGPGTRLTVL

SEQ ID NO: 3972 - protein, 133 aa, Artificial Sequence
  Description of Artificial Sequence: Synthetic polypeptide
MGFRLLCCVAFCLLGAGPVDSGVTQTPKHLITATGQRVTLRCSPRSGDLSVYWYQQSLDQGLQFLIQYYNGEERAKGNILERFSAQQFPDLHSELNLSSLELGDSALYFCASSARGTSDGEQYFGPGTRLTVT

SEQ ID NO: 3973 - protein, 135 aa, Artificial Sequence
  Description of Artificial Sequence: Synthetic polypeptide
MGTSLLCWMALCLLGADHADTGVSQDPRHKITKRGQNVTFRCDPISEHNRLYWYRQTLGQGPEFLTYFQNEAQLEKSRLLSDRFSAERPKGSFSTLEIQRTEQGDSAMYLCASSPSWGANTDTQYFGPGTRLTVL

SEQ ID NO: 3974 - protein, 134 aa, Artificial Sequence
  Description of Artificial Sequence: Synthetic polypeptide
MGSRLLCWVLLCLLGAGPVKAGVTQTPRYLIKTRGQQVTLSCSPISGHRSVSWYQQTPGQGLQFLFEYFSETQRNKGNFPGRFSGRQFSNSRSEMNVSTLELGDSALYLCASSWPGGGPLDEQFFGPGTRLTVL

SEQ ID NO: 3975 - protein, 132 aa, Artificial Sequence
  Description of Artificial Sequence: Synthetic polypeptide
MGTSLLCWMALCLLGADHADTGVSQNPRHKITKRGQNVTFRCDPISEHNRLYWYRQTLGQGPEFLTYFQNEAQLEKSRLLSDRFSAERPKGSFSTLEIQRTEQGDSAMYLCASSHTTGLEQYFGPGTRLTVT

SEQ ID NO: 3976 - protein, 128 aa, Artificial Sequence
  Description of Artificial Sequence: Synthetic polypeptide
MLSLLLLLLGLGSVFSAVISQKPSRDICQRGTSLTIQCQVDSQVTMMFWYRQQPGQSLTLIATANQGSEATYESGFVIDKFPISRPNLTFSTLTVSNMSPEDSSIYLCSVPTGTGELFFGEGSRLTVL

SEQ ID NO: 3977 - protein, 133 aa, Artificial Sequence
  Description of Artificial Sequence: Synthetic polypeptide
MGTRLFFYVALCLLWAGHRDAGITQSPRYKITETGRQVTLMCHQTWSHSYMFWYRQDLGHGLRLIYYSAAADITDKGEVPDGYVVSRSKTENFPLTLESATRSQTSVYFCASSESNPGWYEQYFGPGTRLTVT

SEQ ID NO: 3978 - protein, 134 aa, Artificial Sequence
  Description of Artificial Sequence: Synthetic polypeptide
MGPQLLGYVVLCLLGAGPLEAQVTQNPRYLITVTGKKLTVTCSQNMNHEYMSWYRQDPGLGLRQIYYSMNVEVTDKGDVPEGYKVSRKEKRNFPLILESPSPNQTSLYFCASSLTAGGITGELFFGEGSRLTVL

SEQ ID NO: 3979 - protein, 133 aa, Artificial Sequence
  Description of Artificial Sequence: Synthetic polypeptide
MGPGLLCWALLCLLGAGSVETGVTQSPTHLIKTRGQQVTLRCSSQSGHNTVSWYQQALGQGPQFIFQYYREEENGRGNFPPRFSGLQFPNYSSELNVNALELDDSALYLCASSFARAKTGELFFGEGSRLTVL

SEQ ID NO: 3980 - protein, 133 aa, Artificial Sequence
  Description of Artificial Sequence: Synthetic polypeptide
MSNQVLCCVVLCLLGANTVDGGITQSPKYLFRKEGQNVTLSCEQNLNHDAMYWYRQDPGQGLRLIYYSQIVNDFQKGDIAEGYSVSREKKESFPLTVTSAQKNPTAFYLCASQSNVKSNQPQHFGDGTRLSIL

SEQ ID NO: 3981 - protein, 132 aa, Artificial Sequence
  Description of Artificial Sequence: Synthetic polypeptide
MSTRLLCWMALCLLGAELSEAEVAQSPRYKITEKSQAVAFWCDPISGHATLYWYRQILGQGPELLVQFQDESVVDDSQLPKDRFSAERLKGVDSTLKIQPAELGDSAMYLCASSLAPGRGYTFGSGTRLTVV

SEQ ID NO: 3982 - protein, 132 aa, Artificial Sequence
  Description of Artificial Sequence: Synthetic polypeptide
MGPGLLCWALLCLLGAGLVDAGVTQSPTHLIKTRGQQVTLRCSPKSGHDTVSWYQQALGQGPQFIFQYYEEEERQRGNFPDRFSGHQFPNYSSELNVNALLLGDSALYLCASSFGQGLGEQYFGPGTRLTVT

SEQ ID NO: 3983 - protein, 133 aa, Artificial Sequence
  Description of Artificial Sequence: Synthetic polypeptide
MGPQLLGYVVLCLLGAGPLEAQVTQNPRYLITVTGKKLTVTCSQNMNHEYMSWYRQDPGLGLRQIYYSMNVEVTDKGDVPEGYKVSRKEKRNFPLILESPSPNQTSLYFCASSLNRDSNQPQHFGDGTRLSIL

SEQ ID NO: 3984 - protein, 135 aa, Artificial Sequence
  Description of Artificial Sequence: Synthetic polypeptide
MGPQLLGYVVLCLLGAGPLEAQVTQNPRYLITVTGKKLTVTCSQNMNHEYMSWYRQDPGLGLRQIYYSMNVEVTDKGDVPEGYKVSRKEKRNFPLILESPSPNQTSLYFCASSPTPRQGRAGEQYFGPGTRLTVT

SEQ ID NO: 3985 - protein, 133 aa, Artificial Sequence
  Description of Artificial Sequence: Synthetic polypeptide
MTIRLLCYMGFYFLGAGLMEADIYQTPRYLVIGTGKKITLECSQTMGHDKMYWYQQDPGMELHLIHYSYGVNSTEKGDLSSESTVSRIRTEHFPLTLESARPSHTSQYLCASSGSPDRPYEQYFGPGTRLTVT

SEQ ID NO: 3986 - protein, 132 aa, Artificial Sequence
  Description of Artificial Sequence: Synthetic polypeptide
MGTSLLCWMALCLLGADHADTGVSQNPRHKITKRGQNVTFRCDPISEHNRLYWYRQTLGQGPEFLTYFQNEAQLEKSRLLSDRFSAERPKGSFSTLEIQRTEQGDSAMYLCASSQGISYEQYFGPGTRLTVT

SEQ ID NO: 3987 - protein, 135 aa, Artificial Sequence
  Description of Artificial Sequence: Synthetic polypeptide
MGFRLLCCVAFCLLGAGPVDSGVTQTPKHLITATGQRVTLRCSPRSGDLSVYWYQQSLDQGLQFLIQYYNGEERAKGNILERFSAQQFPDLHSELNLSSLELGDSALYFCASSGGDISGLATEAFFGQGTRLTVV

SEQ ID NO: 3988 - protein, 141 aa, Artificial Sequence
  Description of Artificial Sequence: Synthetic polypeptide
MLSPDLPDSAWNTRLLCHVMLCLLGAGSVAAGVIQSPRHLIKEKRETATLKCYPIPRHDTVYWYQQGPGQDPQFLISFYEKMQSDKGSIPDRFSAQQFSDYHSELNMSSLELGDSALYFCASSLGSPGKLFFGSGTQLSVL

SEQ ID NO: 3989 - protein, 127 aa, Artificial Sequence
  Description of Artificial Sequence: Synthetic polypeptide
MLSLLLLLLGLGSVFSAVISQKPSRDICQRGTSLTIQCQVDSQVTMMFWYRQQPGQSLTLIATANQGSEATYESGFVIDKFPISRPNLTFSTLTVSNMSPEDSSIYLCSLSGGREQFFGPGTRLTVL

SEQ ID NO: 3990 - protein, 135 aa, Artificial Sequence
  Description of Artificial Sequence: Synthetic polypeptide
MSNQVLCCVVLCFLGANTVDGGITQSPKYLFRKEGQNVTLSCEQNLNHDAMYWYRQDPGQGLRLIYYSQIVNDFQKGDIAEGYSVSREKKESFPLTVTSAQKNPTAFYLCASSMFLPGGPADTQYFGPGTRLTVL

SEQ ID NO: 3991 - protein, 132 aa, Artificial Sequence
  Description of Artificial Sequence: Synthetic polypeptide
MGFRLLCCVAFCLLGAGPVDSGVTQTPKHLITATGQRVTLRCSPRSGDLSVYWYQQSLDQGLQFLIQYYNGEERAKGNILERFSAQQFPDLHSELNLSSLELGDSALYFCASSVGGAGYEQYFGPGTRLTVT

SEQ ID NO: 3992 - protein, 132 aa, Artificial Sequence
  Description of Artificial Sequence: Synthetic polypeptide
MGTSLLCWMALCLLGADHADTGVSQDPRHKITKRGQNVTFRCDPISEHNRLYWYRQTLGQGPEFLTYFQNEAQLEKSRLLSDRFSAERPKGSFSTLEIQRTEQGDSAMYLCASSFPRSYEQYFGPGTRLTVT

SEQ ID NO: 3993 - protein, 137 aa, Artificial Sequence
  Description of Artificial Sequence: Synthetic polypeptide
MGCRLLCCVVFCLLQAGPLDTAVSQTPKYLVTQMGNDKSIKCEQNLGHDTMYWYKQDSKKFLKIMFSYNNKELIINETVPNRFSPKSPDKAHLNLHINSLELGDSAVYFCASSQGYFPSGLEVNEQFFGPGTRLTVL

SEQ ID NO: 3994 - protein, 133 aa, Artificial Sequence
  Description of Artificial Sequence: Synthetic polypeptide
MGPRLLFWALLCLLGTGPVEAGVTQSPTHLIKTRGQQATLRCSPISGHTSVYWYQQALGLGLQFLLWYDEGEERNRGNFPPRFSGRQFPNYSSELNVNALELEDSALYLCASSLGQGFYTEAFFGQGTRLTVV

SEQ ID NO: 3995 - protein, 140 aa, Artificial Sequence
  Description of Artificial Sequence: Synthetic polypeptide
MRSWPGPEMGTRLFFYVALCLLWTGHVDAGITQSPRHKVTETGTPVTLRCHQTENHRYMYWYRQDPGHGLRLIHYSYGVKDTDKGEVSDGYSVSRSKTEDFLLTLESATSSQTSVYFCAISESLGRYEQYFGPGTRLTVT

SEQ ID NO: 3996 - protein, 132 aa, Artificial Sequence
  Description of Artificial Sequence: Synthetic polypeptide
MGPQLLGYVVLCLLGAGPLEAQVTQNPRYLITVTGKKLTVTCSQNMNHEYMSWYRQDPGLGLRQIYYSMNVEVTDKGDVPEGYKVSRKEKRNFPLILESPSPNQTSLYFCASSLLGPHTEAFFGQGTRLTVV

SEQ ID NO: 3997 - protein, 135 aa, Artificial Sequence
  Description of Artificial Sequence: Synthetic polypeptide
MGCRLLCCVVFCLLQAGPLDTAVSQTPKYLVTQMGNDKSIKCEQNLGHDTMYWYKQDSKKFLKIMFSYNNKELIINETVPNRFSPKSPDKAHLNLHINSLELGDSAVYFCASSPGTGRFSGNTIYFGEGSWLTVV

SEQ ID NO: 3998 - protein, 133 aa, Artificial Sequence
  Description of Artificial Sequence: Synthetic polypeptide
MGPQLLGYVVLCLLGAGPLEAQVTQNPRYLITVTGKKLTVTCSQNMNHEYMSWYRQDPGLGLRQIYYSMNVEVTDKGDVPEGYKVSRKEKRNFPLILESPSPNQTSLYFCASSQGQMFVYEQYFGPGTRLTVT

SEQ ID NO: 3999 - protein, 138 aa, Artificial Sequence
  Description of Artificial Sequence: Synthetic polypeptide
MGSWTLCCVSLCILVAKHTDAGVIQSPRHEVTEMGQEVTLRCKPISGHDYLFWYRQTMMRGLELLIYFNNNVPIDDSGMPEDRFSAKMPNASFSTLKIQPSEPRDSAVYFCASSLPKGGGMDSYNEQFFGPGTRLTVL

SEQ ID NO: 4000 - protein, 135 aa, Artificial Sequence
  Description of Artificial Sequence: Synthetic polypeptide
MGTSLLCWVVLGFLGTDHTGAGVSQSPRYKVTKRGQDVALRCDPISGHVSLYWYRQALGQGPEFLTYFNYEAQQDKSGLPNDRFSAERPEGSISTLTIQRTEQRDSAMYRCASSLPSGGAYNEQFFGPGTRLTVL

SEQ ID NO: 4001 - protein, 131 aa, Artificial Sequence
  Description of Artificial Sequence: Synthetic polypeptide
MSNQVLCCVVLCFLGANTVDGGITQSPKYLFRKEGQNVTLSCEQNLNHDAMYWYRQDPGQGLRLIYYSQIVNDFQKGDIAEGYSVSREKKESFPLTVTSAQKNPTAFYLCASSITNTYEQYFGPGTRLTVT

SEQ ID NO: 4002 - protein, 132 aa, Artificial Sequence
  Description of Artificial Sequence: Synthetic polypeptide
MGTRLLCWVVLGFLGTDHTGAGVSQSPRYKVAKRGQDVALRCDPISGHVSLFWYQQALGQGPEFLTYFQNEAQLDKSGLPSDRFFAERPEGSVSTLKIQRTQQEDSAVYLCASSLASKGLGFFGPGTRLTVL

SEQ ID NO: 4003 - protein, 132 aa, Artificial Sequence
  Description of Artificial Sequence: Synthetic polypeptide
MGFRLLCCVAFCLLGAGPVDSGVTQTPKHLITATGQRVTLRCSPRSGDLSVYWYQQSLDQGLQFLIQYYNGEERAKGNILERFSAQQFPDLHSELNLSSLELGDSALYFCASSVEGAQETQYFGPGTRLLVL

SEQ ID NO: 4004 - protein, 134 aa, Artificial Sequence
  Description of Artificial Sequence: Synthetic polypeptide
MSIGLLCCVAFSLLWASPVNAGVTQTPKFQVLKTGQSMTLQCAQDMNHNSMYWYRQDPGMGLRLIYYSASEGTTDKGEVPNGYNVSRLNKREFSLRLESAAPSQTSVYFCASSGSGTGGSGGYTFGSGTRLTVV

SEQ ID NO: 4005 - protein, 131 aa, Artificial Sequence
  Description of Artificial Sequence: Synthetic polypeptide
MGTRLLCWAALCLLGADHTGAGVSQTPSNKVTEKGKYVELRCDPISGHTALYWYRQSLGQGPEFLIYFQGTGAADDSGLPNDRFFAVRPEGSVSTLKIQRTERGDSAVYLCASSPVAGELFFGEGSRLTVL

SEQ ID NO: 4006 - protein, 134 aa, Artificial Sequence
  Description of Artificial Sequence: Synthetic polypeptide
MASLLFFCGAFYLLGTGSMDADVTQTPRNRITKTGKRIMLECSQTKGHDRMYWYRQDPGLGLQLIYYSFDVKDINKGEISDGYSVSRQAQAKFSLSLESAIPNQTALYFCATSEGQESHTGELFFGEGSRLTVL

SEQ ID NO: 4007 - protein, 135 aa, Artificial Sequence
  Description of Artificial Sequence: Synthetic polypeptide
MGTRLLCWVVLGFLGTDHTGAGVSQSPRYKVAKRGQDVALRCDPISGHVSLFWYQQALGQGPEFLTYFQNEAQLDKSGLPSDRFFAERPEGSVSTLKIQRTQQEDSAVYLCASSLVPGSSIYEQYFGPGTRLTVT

SEQ ID NO: 4008 - protein, 131 aa, Artificial Sequence
  Description of Artificial Sequence: Synthetic polypeptide
MTIRLLCYMGFYFLGAGLMEADIYQTPRYLVIGTGKKITLECSQTMGHDKMYWYQQDPGMELHLIHYSYGVNSTEKGDLSSESTVSRIRTEHFPLTLESARPSHTSQYLCASSERGSYEQYFGPGTRLTVT

SEQ ID NO: 4009 - protein, 134 aa, Artificial Sequence
  Description of Artificial Sequence: Synthetic polypeptide
MGTRLLCWVVLGFLGTDHTGAGVSQSPRYKVAKRGQDVALRCDPISGHVSLFWYQQALGQGPEFLTYFQNEAQLDKSGLPSDRFFAERPEGSVSTLKIQRTQQEDSAVYLCASRSRANPYNEQFFGPGTRLTVL

SEQ ID NO: 4010 - protein, 134 aa, Artificial Sequence
  Description of Artificial Sequence: Synthetic polypeptide
MGFRLLCCVAFCLLGAGPVDSGVTQTPKHLITATGQRVTLRCSPRSGDLSVYWYQQSLDQGLQFLIQYYNGEERAKGNILERFSAQQFPDLHSELNLSSLELGDSALYFCASSVNTGEGSYGYTFGSGTRLTVV

SEQ ID NO: 4011 - protein, 134 aa, Artificial Sequence
  Description of Artificial Sequence: Synthetic polypeptide
MSNQVLCCVVLCLLGANTVDGGITQSPKYLFRKEGQNVTLSCEQNLNHDAMYWYRQDPGQGLRLIYYSQIVNDFQKGDIAEGYSVSREKKESFPLTVTSAQKNPTAFYLCASSNPFRGENTEAFFGQGTRLTVV

SEQ ID NO: 4012 - protein, 133 aa, Artificial Sequence
  Description of Artificial Sequence: Synthetic polypeptide
MVSRLLSLVSLCLLGAKHIEAGVTQFPSHSVIEKGQTVTLRCDPISGHDNLYWYRRVMGKEIKFLLHFVKESKQDESGMPNNRFLAERTGGTYSTLKVQPAELEDSGVYFCASSQAVTGHEQFFGPGTRLTVL

SEQ ID NO: 4013 - protein, 131 aa, Artificial Sequence
  Description of Artificial Sequence: Synthetic polypeptide
MGFRLLCCVAFCLLGAGPVDSGVTQTPKHLITATGQRVTLRCSPRSGDLSVYWYQQSLDQGLQFLIQYYNGEERAKGNILERFSAQQFPDLHSELNLSSLELGDSALYFCASSVASSYEQYFGPGTRLTVT

SEQ ID NO: 4014 - protein, 136 aa, Artificial Sequence
  Description of Artificial Sequence: Synthetic polypeptide
MGCRLLCCVVFCLLQAGPLDTAVSQTPKYLVTQMGNDKSIKCEQNLGHDTMYWYKQDSKKFLKIMFSYNNKELIINETVPNRFSPKSPDKAHLNLHINSLELGDSAVYFCASSQENWGLLGAETQYFGPGTRLLVL

SEQ ID NO: 4015 - protein, 133 aa, Artificial Sequence
  Description of Artificial Sequence: Synthetic polypeptide
MGTRLLFWVAFCLLGADHTGAGVSQSPSNKVTEKGKDVELRCDPISGHTALYWYRQSLGQGLEFLIYFQGNSAPDKSGLPSDRFSAERTGGSVSTLTIQRTQQEDSAVYLCASSFTADVYGYTFGSGTRLTVV

SEQ ID NO: 4016 - protein, 134 aa, Artificial Sequence
  Description of Artificial Sequence: Synthetic polypeptide
MGTSLLCWMALCLLGADHADTGVSQNPRHKITKRGQNVTFRCDPISEHNRLYWYRQTLGQGPEFLTYFQNEAQLEKSRLLSDRFSAERPKGSFSTLEIQRTEQGDSAMYLCASSLVTGQGDGYTFGSGTRLTVV

SEQ ID NO: 4017 - protein, 134 aa, Artificial Sequence
  Description of Artificial Sequence: Synthetic polypeptide
MGTRLLCWVAFCLLVEELIEAGVVQSPRYKIIEKKQPVAFWCNPISGHNTLYWYRQNLGQGPELLIRYENEEAVDDSQLPKDRFSAERLKGVDSTLKIQPAELGDSAVYLCASSGRQGGLYEQYFGPGTRLTVT

SEQ ID NO: 4018 - protein, 132 aa, Artificial Sequence
  Description of Artificial Sequence: Synthetic polypeptide
MGSWTLCCVSLCILVAKHTDAGVIQSPRHEVTEMGQEVTLRCKPISGHDYLFWYRQTMMRGLELLIYFNNNVPIDDSGMPEDRFSAKMPNASFSTLKIQPSEPRDSAVYFCASSGTYTDTQYFGPGTRLTVL

SEQ ID NO: 4019 - protein, 133 aa, Artificial Sequence
  Description of Artificial Sequence: Synthetic polypeptide
MGPQLLGYVVLCLLGAGPLEAQVTQNPRYLITVTGKKLTVTCSQNMNHEYMSWYRQDPGLGLRQIYYSMNVEVTDKGDVPEGYKVSRKEKRNFPLILESPSPNQTSLYFCASSLSGTGVDEQYFGPGTRLTVT

SEQ ID NO: 4020 - protein, 133 aa, Artificial Sequence
  Description of Artificial Sequence: Synthetic polypeptide
MSIGLLCCAALSLLWAGPVNAGVTQTPKFQVLKTGQSMTLQCAQDMNHEYMSWYRQDPGMGLRLIHYSVGAGITDQGEVPNGYNVSRSTTEDFPLRLLSAAPSQTSVYFCASSYAGTNTGELFFGEGSRLTVL

SEQ ID NO: 4021 - protein, 133 aa, Artificial Sequence
  Description of Artificial Sequence: Synthetic polypeptide
MGSWTLCCVSLCILVAKHTDAGVIQSPRHEVTEMGQEVTLRCKPISGHDYLFWYRQTMMRGLELLIYFNNNVPIDDSGMPEDRFSAKMPNASFSTLKIQPSEPRDSAVYFCACTGPRFTDTQYFGPGTRLTVL

SEQ ID NO: 4022 - protein, 132 aa, Artificial Sequence
  Description of Artificial Sequence: Synthetic polypeptide
MGPQLLGYVVLCLLGAGPLEAQVTQNPRYLITVTGKKLTVTCSQNMNHEYMSWYRQDPGLGLRQIYYSMNVEVTDKGDVPEGYKVSRKEKRNFPLILESPSPNQTSLYFCASSLSSGFFGYTFGSGTRLTVV

SEQ ID NO: 4023 - protein, 133 aa, Artificial Sequence
  Description of Artificial Sequence: Synthetic polypeptide
MGTSLLCWMALCLLGADHADTGVSQDPRHKITKRGQNVTFRCDPISEHNRLYWYRQTLGQGPEFLTYFQNEAQLEKSRLLSDRFSAERPKGSFSTLEIQRTEQGDSAMYLCASSFGGEGDIQYFGAGTRLSVL

SEQ ID NO: 4024 - protein, 130 aa, Artificial Sequence
  Description of Artificial Sequence: Synthetic polypeptide
MGTRLFFYVALCLLWTGHVDAGITQSPRHKVTETGTPVTLRCHQTENHRYMYWYRQDPGHGLRLIHYSYGVKDTDKGEVSDGYSVSRSKTEDFLLTLESATSSQTSVYFCAISDPSLEAFFGQGTRLTVV

SEQ ID NO: 4025 - protein, 133 aa, Artificial Sequence
  Description of Artificial Sequence: Synthetic polypeptide
MDTRVLCCAVICLLGAGLSNAGVMQNPRHLVRRRGQEARLRCSPMKGHSHVYWYRQLPEEGLKFMVYLQKENIIDESGMPKERFSAEFPKEGPSILRIQQVVRGDSAAYFCASSPETGTYEQYFGPGTRLTVT

SEQ ID NO: 4026 - protein, 134 aa, Artificial Sequence
  Description of Artificial Sequence: Synthetic polypeptide
MGTRLLCWVAFCLLVEELIEAGVVQSPRYKIIEKKQPVAFWCNPISGHNTLYWYRQNLGQGPELLIRYENEEAVDDSQLPKDRFSAERLKGVDSTLKIQPAELGDSAVYLCASSPRQGAGTEAFFGQGTRLTVV

SEQ ID NO: 4027 - protein, 134 aa, Artificial Sequence
  Description of Artificial Sequence: Synthetic polypeptide
MGTRLLCWVVLGFLGTDHTGAGVSQSPRYKVAKRGQDVALRCDPISGHVSLFWYQQALGQGPEFLTYFQNEAQLDKSGLPSDRFFAERPEGSVSTLKIQRTQQEDSAVYLCASSSDRVVAGELFFGEGSRLTVL

SEQ ID NO: 4028 - protein, 131 aa, Artificial Sequence
  Description of Artificial Sequence: Synthetic polypeptide
MGPGLLCWVLLCLLGAGSVETGVTQSPTHLIKTRGQQVTLRCSSQSGHNTVSWYQQALGQGPQFIFQYYREEENGRGNFPPRFSGLQFPNYSSELNVNALELDDSALYLCASGRGVLEKLFFGSGTQLSVL

SEQ ID NO: 4029 - protein, 131 aa, Artificial Sequence
  Description of Artificial Sequence: Synthetic polypeptide
MGPQLLGYVVLCLLGAGPLEAQVTQNPRYLITVTGKKLTVTCSQNMNHEYMSWYRQDPGLGLRQIYYSMNVEVTDKGDVPEGYKVSRKEKRNFPLILESPSPNQTSLYFCASSFGTNTEAFFGQGTRLTVV

SEQ ID NO: 4030 - protein, 133 aa, Artificial Sequence
  Description of Artificial Sequence: Synthetic polypeptide
MGTRLLFWVAFCLLGADHTGAGVSQSPSNKVTEKGKDVELRCDPISGHTALYWYRQSLGQGLEFLIYFQGNSAPDKSGLPSDRFSAERTGGSVSTLTIQRTQQEDSAVYLCASSLGREWYEQYFGPGTRLTVT

SEQ ID NO: 4031 - protein, 133 aa, Artificial Sequence
  Description of Artificial Sequence: Synthetic polypeptide
MGFRLLCCVAFCLLGAGPVDSGVTQTPKHLITATGQRVTLRCSPRSGDLSVYWYQQSLDQGLQFLIQYYNGEERAKGNILERFSAQQFPDLHSELNLSSLELGDSALYFCASSVDGGGVNEQFFGPGTRLTVL

SEQ ID NO: 4032 - protein, 134 aa, Artificial Sequence
  Description of Artificial Sequence: Synthetic polypeptide
MGTSLLCWMALCLLGADHADTGVSQDPRHKITKRGQNVTFRCDPISEHNRLYWYRQTLGQGPEFLTYFQNEAQLEKSRLLSDRFSAERPKGSFSTLEIQRTEQGDSAMYLCASSLAGHVNQPQHFGDGTRLSIL

SEQ ID NO: 4033 - protein, 130 aa, Artificial Sequence
  Description of Artificial Sequence: Synthetic polypeptide
MLLLLLLLGPAGSGLGAVVSQHPSWVICKSGTSVKIECRSLDFQATTMFWYRQFPKQSLMLMATSNEGSKATYEQGVEKDKFLINHASLTLSTLTVTSAHPEDSSFYICSARDRGSYEQYFGPGTRLTVT

SEQ ID NO: 4034 - protein, 132 aa, Artificial Sequence
  Description of Artificial Sequence: Synthetic polypeptide
MGIRLLCRVAFCFLAVGLVDVKVTQSSRYLVKRTGEKVFLECVQDMDHENMFWYRQDPGLGLRLIYFSYDVKMKEKGDIPEGYSVSREKKERFSLILESASTNQTSMYLCASMPGERPYEQYFGPGTRLTVT

SEQ ID NO: 4035 - protein, 132 aa, Artificial Sequence
  Description of Artificial Sequence: Synthetic polypeptide
MGTSLLCWMALCLLGADHADTGVSQDPRHKITKRGQNVTFRCDPISEHNRLYWYRQTLGQGPEFLTYFQNEAQLEKSRLLSDRFSAERPKGSFSTLEIQRTEQGDSAMYLCASSATGAYEQYFGPGTRLTVT

SEQ ID NO: 4036 - protein, 132 aa, Artificial Sequence
  Description of Artificial Sequence: Synthetic polypeptide
MSNQVLCCVVLCLLGANTVDGGITQSPKYLFRKEGQNVTLSCEQNLNHDAMYWYRQDPGQGLRLIYYSQIVNDFQKGDIAEGYSVSREKKESFPLTVTSAQKNPTAFYLCASSMSGNTGELFFGEGSRLTVL

SEQ ID NO: 4037 - protein, 132 aa, Artificial Sequence
  Description of Artificial Sequence: Synthetic polypeptide
MSNQVLCCVVLCLLGANTVDGGITQSPKYLFRKEGQNVTLSCEQNLNHDAMYWYRQDPGQGLRLIYYSQIVNDFQKGDIAEGYSVSREKKESFPLTVTSAQKNPTAFYLCASSIIGGSTEAFFGQGTRLTVV

SEQ ID NO: 4038 - protein, 133 aa, Artificial Sequence
  Description of Artificial Sequence: Synthetic polypeptide
MSNQVLCCVVLCLLGANTVDGGITQSPKYLFRKEGQNVTLSCEQNLNHDAMYWYRQDPGQGLRLIYYSQIVNDFQKGDIAEGYSVSREKKESFPLTVTSAQKNPTAFYLCASSILAGGYNEQFFGPGTRLTVL

SEQ ID NO: 4039 - protein, 134 aa, Artificial Sequence
  Description of Artificial Sequence: Synthetic polypeptide
MGPQLLGYVVLCLLGAGPLEAQVTQNPRYLITVTGKKLTVTCSQNMNHEYMSWYRQDPGLGLRQIYYSMNVEVTDKGDVPEGYKVSRKEKRNFPLILESPSPNQTSLYFCASSSPLSGGGDIQYFGAGTRLSVL

SEQ ID NO: 4040 - protein, 131 aa, Artificial Sequence
  Description of Artificial Sequence: Synthetic polypeptide
MGPQLLGYVVLCLLGAGPLEAQVTQNPRYLITVTGKKLTVTCSQNMNHEYMSWYRQDPGLGLRQIYYSMNVEVTDKGDVPEGYKVSRKEKRNFPLILESPSPNQTSLYFCASSSNGGQPQHFGDGTRLSIL

SEQ ID NO: 4041 - protein, 133 aa, Artificial Sequence
  Description of Artificial Sequence: Synthetic polypeptide
MGPGLLCWVLLCLLGAGSVETGVTQSPTHLIKTRGQQVTLRCSSQSGHNTVSWYQQALGQGPQFIFQYYREEENGRGNFPPRFSGLQFPNYSSELNVNALELDDSALYLCASSLVGTGHYGYTFGSGTRLTVV

SEQ ID NO: 4042 - protein, 136 aa, Artificial Sequence
  Description of Artificial Sequence: Synthetic polypeptide
MGTRLLCWVVLGFLGTDHTGAGVSQSPRYKVAKRGQDVALRCDPISGHVSLFWYQQALGQGPEFLTYFQNEAQLDKSGLPSDRFFAERPEGSVSTLKIQRTQQEDSAVYLCASSEQDQLSSYNEQFFGPGTRLTVL

SEQ ID NO: 4043 - protein, 134 aa, Artificial Sequence
  Description of Artificial Sequence: Synthetic polypeptide
MDTWLVCWAIFSLLKAGLTEPEVTQTPSHQVTQMGQEVILRCVPISNHLYFYWYRQILGQKVEFLVSFYNNEISEKSEIFDDQFSVERPDGSNFTLKIRSTKLEDSAMYFCASSVYRASSYEQYFGPGTRLTVT

SEQ ID NO: 4044 - protein, 134 aa, Artificial Sequence
  Description of Artificial Sequence: Synthetic polypeptide
MGFRLLCCVAFCLLGAGPVDSGVTQTPKHLITATGQRVTLRCSPRSGDLSVYWYQQSLDQGLQFLIQYYNGEERAKGNILERFSAQQFPDLHSELNLSSLELGDSALYFCASSTGTSLTVYGYTFGSGTRLTVV

SEQ ID NO: 4045 - protein, 134 aa, Artificial Sequence
  Description of Artificial Sequence: Synthetic polypeptide
MGFRLLCCVAFCLLGAGPVDSGVTQTPKHLITATGQRVTLRCSPRSGDLSVYWYQQSLDQGLQFLIQYYNGEERAKGNILERFSAQQFPDLHSELNLSSLELGDSALYFCASSPRLAGAYNEQFFGPGTRLTVL

SEQ ID NO: 4046 - protein, 130 aa, Artificial Sequence
  Description of Artificial Sequence: Synthetic polypeptide
MGPGLLCWALLCLLGAGLVDAGVTQSPTHLIKTRGQQVTLRCSPKSGHDTVSWYQQALGQGPQFIFQYYEEEERQRGNFPDRFSGHQFPNYSSELNVNALLLGDSALYLCASSLGGTEAFFGQGTRLTVV

SEQ ID NO: 4047 - protein, 132 aa, Artificial Sequence
  Description of Artificial Sequence: Synthetic polypeptide
MGFRLLCCVAFCLLGAGPVDSGVTQTPKHLITATGQRVTLRCSPRSGDLSVYWYQQSLDQGLQFLIQYYNGEERAKGNILERFSAQQFPDLHSELNLSSLELGDSALYFCASSAGGANTEAFFGQGTRLTVV

SEQ ID NO: 4048 - protein, 136 aa, Artificial Sequence
  Description of Artificial Sequence: Synthetic polypeptide
MGTRLLCWAALCLLGAELTEAGVAQSPRYKIIEKRQSVAFWCNPISGHATLYWYQQILGQGPKLLIQFQNNGVVDDSQLPKDRFSAERLKGVDSTLKIQPAKLEDSAVYLCASSLARAGGLTGELFFGEGSRLTVL

SEQ ID NO: 4049 - protein, 132 aa, Artificial Sequence
  Description of Artificial Sequence: Synthetic polypeptide
MASLLFFCGAFYLLGTGSMDADVTQTPRNRITKTGKRIMLECSQTKGHDRMYWYRQDPGLGLRLIYYSFDVKDINKGEISDGYSVSRQAQAKFSLSLESAIPNQTALYFCATSGGTRHNEQFFGPGTRLTVL

SEQ ID NO: 4050 - protein, 131 aa, Artificial Sequence
  Description of Artificial Sequence: Synthetic polypeptide
MGPGLLCWVLLCLLGAGSVETGVTQSPTHLIKTRGQQVTLRCSSQSGHNTVSWYQQALGQGPQFIFQYYREEENGRGNFPPRFSGLQFPNYSSELNVNALELDDSALYLCASSLAGYSPLHFGNGTRLTVT

SEQ ID NO: 4051 - protein, 135 aa, Artificial Sequence
  Description of Artificial Sequence: Synthetic polypeptide
MGTSLLCWMALCLLGADHADTGVSQNPRHKITKRGQNVTFRCDPISEHNRLYWYRQTLGQGPEFLTYFQNEAQLEKSRLLSDRFSAERPKGSFSTLEIQRTEQGDSAMYLCASSSRGGLDTGELFFGEGSRLTVL

SEQ ID NO: 4052 - protein, 131 aa, Artificial Sequence
  Description of Artificial Sequence: Synthetic polypeptide
MGTRLLCWAALCLLGAELTEAGVAQSPRYKIIEKRQSVAFWCNPISGHATLYWYQQILGQGPKLLIQFQNNGVVDDSQLPKDRFSAERLKGVDSTLKIQPAKLEDSAVYLCASSLGIADYTFGSGTRLTVV

SEQ ID NO: 4053 - protein, 133 aa, Artificial Sequence
  Description of Artificial Sequence: Synthetic polypeptide
MGFRLLCCVAFCLLGAGPVDSGVTQTPKHLITATGQRVTLRCSPRSGDLSVYWYQQSLDQGLQFLIQYYNGEERAKGNILERFSAQQFPDLHSELNLSSLELGDSALYFCASSLGWGPNTEAFFGQGTRLTVV

SEQ ID NO: 4054 - protein, 137 aa, Artificial Sequence
  Description of Artificial Sequence: Synthetic polypeptide
MGTRLLFWVAFCLLGADHTGAGVSQSPSNKVTEKGKDVELRCDPISGHTALYWYRQSLGQGLEFLIYFQGNSAPDKSGLPSDRFSAERTGGSVSTLTIQRTQQEDSAVYLCASSSGLAAYSGANVLTFGAGSRLTVL

SEQ ID NO: 4055 - protein, 143 aa, Artificial Sequence
  Description of Artificial Sequence: Synthetic polypeptide
MRSWPGPEMGTRLFFYVALCLLWTGHVDAGITQSPRHKVTETGTPVTLRCHQTENHRYMYWYRQDPGHGLRLIHYSYGVKDTDKGEVSDGYSVSRSKTEDFLLTLESATSSQTSVYFCAISDPWQGYSGNTIYFGEGSWLTVV

SEQ ID NO: 4056 - protein, 131 aa, Artificial Sequence
  Description of Artificial Sequence: Synthetic polypeptide
MGSRLLCWVLLCLLGAGPVKAGVTQTPRYLIKTRGQQVTLSCSPISGHRSVSWYQQTPGQGLQFLFEYFSETQRNKGNFPGRFSGRQFSNSRSEMNVSTLELGDSALYLCASSLARGETQYFGPGTRLLVL

SEQ ID NO: 4057 - protein, 133 aa, Artificial Sequence
  Description of Artificial Sequence: Synthetic polypeptide
MSISLLCCAAFPLLWAGPVNAGVTQTPKFRILKIGQSMTLQCTQDMNHNYMYWYRQDPGMGLKLIYYSVGAGITDKGEVPNGYNVSRSTTEDFPLRLELAAPSQTSVYFCASSYSSSSNQPQHFGDGTRLSIL

SEQ ID NO: 4058 - protein, 133 aa, Artificial Sequence
  Description of Artificial Sequence: Synthetic polypeptide
MGTRLLFWVAFCLLGAYHTGAGVSQSPSNKVTEKGKDVELRCDPISGHTALYWYRQRLGQGLEFLIYFQGNSAPDKSGLPSDRFSAERTGESVSTLTIQRTQQEDSAVYLCASSPGTSYNEQFFGPGTRLTVL

SEQ ID NO: 4059 - protein, 128 aa, Artificial Sequence
  Description of Artificial Sequence: Synthetic polypeptide
MLSLLLLLLGLGSVFSAVISQKPSRDICQRGTSLTIQCQVDSQVTMMFWYRQQPGQSLTLIATANQGSEATYESGFVIDKFPISRPNLTFSTLTVSNMSPEDSSIYLCSVVDQDTEAFFGQGTRLTVV

SEQ ID NO: 4060 - protein, 132 aa, Artificial Sequence
  Description of Artificial Sequence: Synthetic polypeptide
MGSWTLCCVSLCILVAKHTDAGVIQSPRHEVTEMGQEVTLRCKPISGHDYLFWYRQTMMRGLELLIYFNNNVPIDDSGMPEDRFSAKMPNASFSTLKIQPSEPRDSAVYFCASSFQGNQPQHFGDGTRLSIL

SEQ ID NO: 4061 - protein, 134 aa, Artificial Sequence
  Description of Artificial Sequence: Synthetic polypeptide
MGFRLLCCVAFCLLGAGPVDSGVTQTPKHLITATGQRVTLRCSPRSGDLSVYWYQQSLDQGLQFLIQYYNGEERAKGNILERFSAQQFPDLHSELNLSSLELGDSALYFCASSAQGAGANEKLFFGSGTQLSVL

SEQ ID NO: 4062 - protein, 130 aa, Artificial Sequence
  Description of Artificial Sequence: Synthetic polypeptide
MGSRLLCWVLLCLLGAGPVKAGVTQTPRYLIKTRGQQVTLSCSPISGHRSVSWYQQTPGQGLQFLFEYFSETQRNKGNFPGRFSGRQFSNSRSEMNVSTLELGDSALYLCASKGDGYEQYFGPGTRLTVT

SEQ ID NO: 4063 - protein, 133 aa, Artificial Sequence
  Description of Artificial Sequence: Synthetic polypeptide
MSNQVLCCVVLCLLGANTVDGGITQSPKYLFRKEGQNVTLSCEQNLNHDAMYWYRQDPGQGLRLIYYSQIVNDFQKGDIAEGYSVSREKKESFPLTVTSAQKNPTAFYLCASSIMAGGLGEQFFGPGTRLTVL

SEQ ID NO: 4064 - protein, 132 aa, Artificial Sequence
  Description of Artificial Sequence: Synthetic polypeptide
MGCRLLCCAVLCLLGAVPIDTEVTQTPKHLVMGMTNKKSLKCEQHMGHRAMYWYKQKAKKPPELMFVYSYEKLSINESVPSRFSPECPNSSLLNLHLHALQPEDSALYLCASSPQTGEVRVFFGSGTQLSVL

SEQ ID NO: 4065 - protein, 130 aa, Artificial Sequence
  Description of Artificial Sequence: Synthetic polypeptide
MGPQLLGYVVLCLLGAGPLEAQVTQNPRYLITVTGKKLTVTCSQNMNHEYMSWYRQDPGLGLRQIYYSMNVEVTDKGDVPEGYKVSRKEKRNFPLILESPSPNQTSLYFCASSFLNNEQFFGPGTRLTVL

SEQ ID NO: 4066 - protein, 131 aa, Artificial Sequence
  Description of Artificial Sequence: Synthetic polypeptide
MGFRLLCCVAFCLLGAGPVDSGVTQTPKHLITATGQRVTLRCSPRSGDLSVYWYQQSLDQGLQFLIQYYNGEERAKGNILERFSAQQFPDLHSELNLSSLELGDSALYFCASSVAGEQPQHFGDGTRLSIL

SEQ ID NO: 4067 - protein, 133 aa, Artificial Sequence
  Description of Artificial Sequence: Synthetic polypeptide
MGFRLLCCVAFCLLGAGPVDSGVTQTPKHLITATGQRVTLRCSPRSGDLSVYWYQQSLDQGLQFLIQYYNGEERAKGNILERFSAQQFPDLHSELNLSSLELGDSALYFCASSATGGAWYGYTFGSGTRLTVV

SEQ ID NO: 4068 - protein, 132 aa, Artificial Sequence
  Description of Artificial Sequence: Synthetic polypeptide
MGCRLLCCAVLCLLGAVPIDTEVTQTPKHLVMGMTNKKSLKCEQHMGHRAMYWYKQKAKKPPELMFVYSYEKLSINESVPSRFSPECPNSSLLNLHLHALQPEDSALYLCASSQASGPNEQFFGPGTRLTVL

SEQ ID NO: 4069 - protein, 133 aa, Artificial Sequence
  Description of Artificial Sequence: Synthetic polypeptide
MASLLFFCGAFYLLGTGSMDADVTQTPRNRITKTGKRIMLECSQTKGHDRMYWYRQDPGLGLRLIYYSFDVKDINKGEISDGYSVSRQAQAKFSLSLESAIPNQTALYFCATSQQGAGTDTQYFGPGTRLTVL

SEQ ID NO: 4070 - protein, 135 aa, Artificial Sequence
  Description of Artificial Sequence: Synthetic polypeptide
MGTSLLCWMALCLLGADHADTGVSQNPRHKITKRGQNVTFRCDPISEHNRLYWYRQTLGQGPEFLTYFQNEAQLEKSRLLSDRFSAERPKGSFSTLEIQRTEQGDSAMYLCASSLVTGHYNSPLHFGNGTRLTVT

SEQ ID NO: 4071 - protein, 132 aa, Artificial Sequence
  Description of Artificial Sequence: Synthetic polypeptide
MGIRLLCRVAFCFLAVGLVDVKVTQSSRYLVKRTGEKVFLECVQDMDHENMFWYRQDPGLGLRLIYFSYDVKMKEKGDIPEGYSVSREKKERFSLILESASTNQTSMYLCASSFRGLNTEAFFGQGTRLTVV

SEQ ID NO: 4072 - protein, 133 aa, Artificial Sequence
  Description of Artificial Sequence: Synthetic polypeptide
MGTSLLCWMALCLLGADHADTGVSQDPRHKITKRGQNVTFRCDPISEHNRLYWYRQTLGQGPEFLTYFQNEAQLEKSRLLSDRFSAERPKGSFSTLEIQRTEQGDSAMYLCASSPPTNLETQYFGPGTRLLVL

SEQ ID NO: 4073 - protein, 131 aa, Artificial Sequence
  Description of Artificial Sequence: Synthetic polypeptide
MLLLLLLLGPGSGLGAVVSQHPSRVICKSGTSVKIECRSLDFQATTMFWYRQFPKQSLMLMATSNEGSKATYEQGVEKDKFLINHASLTLSTLTVTSAHPEDSSFYICSARPQDLSGNTIYFGEGSWLTVV

SEQ ID NO: 4074 - protein, 131 aa, Artificial Sequence
  Description of Artificial Sequence: Synthetic polypeptide
MGSRLLCWVLLCLLGAGPVKAGVTQTPRYLIKTRGQQVTLSCSPISGHRSVSWYQQTPGQGLQFLFEYFSETQRNKGNFPGRFSGRQFSNSRSEMNVSTLELGDSALYLCASSLASVEEAFFGQGTRLTVV

SEQ ID NO: 4075 - protein, 131 aa, Artificial Sequence
  Description of Artificial Sequence: Synthetic polypeptide
MLSLLLLLLGLGSVFSAVISQKPSRDICQRGTSLTIQCQVDSQVTMMFWYRQQPGQSLTLIATANQGSEATYESGFVIDKFPISRPNLTFSTLTVSNMSPEDSSIYLCSVEEDRDRGYEQYFGPGTRLTVT

SEQ ID NO: 4076 - protein, 132 aa, Artificial Sequence
  Description of Artificial Sequence: Synthetic polypeptide
MGTRLLFWVAFCLLGADHTGAGVSQSPSNKVTEKGKDVELRCDPISGHTALYWYRQSLGQGLEFLIYFQGNSAPDKSGLPSDRFSAERTGGSVSTLTIQRTQQEDSAVYLCASSLITEIEAFFGQGTRLTVV

SEQ ID NO: 4077 - protein, 133 aa, Artificial Sequence
  Description of Artificial Sequence: Synthetic polypeptide
MGFRLLCCVAFCLLGAGPVDSGVTQTPKHLITATGQRVTLRCSPRSGDLSVYWYQQSLDQGLQFLIQYYNGEERAKGNILERFSAQQFPDLHSELNLSSLELGDSALYFCASSTPDRVWTEAFFGQGTRLTVV

SEQ ID NO: 4078 - protein, 132 aa, Artificial Sequence
  Description of Artificial Sequence: Synthetic polypeptide
MGIRLLCRVAFCFLAVGLVDVKVTQSSRYLVKRTGEKVFLECVQDMDHENMFWYRQDPGLGLRLIYFSYDVKMKEKGDIPEGYSVSREKKERFSLILESASTNQTSMYLCASSIQGMAYEQYFGPGTRLTVT

SEQ ID NO: 4079 - protein, 133 aa, Artificial Sequence
  Description of Artificial Sequence: Synthetic polypeptide
MGPGLLHWMALCLLGTGHGDAMVIQNPRYQVTQFGKPVTLSCSQTLNHNVMYWYQQKSSQAPKLLFHYYDKDFNNEADTPDNFQSRRPNTSFCFLDIRSPGLGDAAMYLCATSRDLSNQETQYFGPGTRLLVL

SEQ ID NO: 4080 - protein, 142 aa, Artificial Sequence
  Description of Artificial Sequence: Synthetic polypeptide
MLSPDLPDSAWNTRLLCRVMLCLLGAGSVAAGVIQSPRHLIKEKRETATLKCYPIPRHDTVYWYQQGPGQDPQFLISFYEKMQSDKGSIPDRFSAQQFSDYHSELNMSSLELGDSALYFCASSVSGYNEKLFFGSGTQLSVL

SEQ ID NO: 4081 - protein, 134 aa, Artificial Sequence
  Description of Artificial Sequence: Synthetic polypeptide
MGTSLLCWMALCLLGADHADTGVSQNPRHKITKRGQNVTFRCDPISEHNRLYWYRQTLGQGPEFLTYFQNEAQLEKSRLLSDRFSAERPKGSFSTLEIQRTEQGDSAMYLCASSPSLGMNTEAFFGQGTRLTVV

SEQ ID NO: 4082 - protein, 132 aa, Artificial Sequence
  Description of Artificial Sequence: Synthetic polypeptide
MGPGLLCWALLCLLGAGSVETGVTQSPTHLIKTRGQQVTLRCSSQSGHNTVSWYQQALGQGPQFIFQYYREEENGRGNFPPRFSGLQFPNYSSELNVNALELDDSALYLCASSLGGSNQPQHFGDGTRLSIL

SEQ ID NO: 4083 - protein, 136 aa, Artificial Sequence
  Description of Artificial Sequence: Synthetic polypeptide
MGTRLLCWVVLGFLGTDHTGAGVSQSPRYKVAKRGQDVALRCDPISGHVSLFWYQQALGQGPEFLTYFQNEAQLDKSGLPSDRFFAERPEGSVSTLKIQRTQQEDSAVYLCASSSLGGTHSNQPQHFGDGTRLSIL

SEQ ID NO: 4084 - protein, 133 aa, Artificial Sequence
  Description of Artificial Sequence: Synthetic polypeptide
MDTWLVCWAIFSLLKAGLTEPEVTQTPSHQVTQMGQEVILRCVPISNHLYFYWYRQILGQKVEFLVSFYNNEISEKSEIFDDQFSVERPDGSNFTLKIRSTKLEDSAMYFCASIGTSGNNEQFFGPGTRLTVL

SEQ ID NO: 4085 - protein, 132 aa, Artificial Sequence
  Description of Artificial Sequence: Synthetic polypeptide
MGPQLLGYVVLCLLGAGPLEAQVTQNPRYLITVTGKKLTVTCSQNMNHEYMSWYRQDPGLGLRQIYYSMNVEVTDKGDVPEGYKVSRKEKRNFPLILESPSPNQTSLYFCASSLGGLNTEAFFGQGTRLTVV

SEQ ID NO: 4086 - protein, 132 aa, Artificial Sequence
  Description of Artificial Sequence: Synthetic polypeptide
MGSRLLCWVLLCLLGAGPVKAGVTQTPRYLIKTRGQQVTLSCSPISGHRSVSWYQQTPGQGLQFLFEYFSETQRNKGNFPGRFSGRQFSNSRSEMNVSTLELGDSALYLCASSLRRYQETQYFGPGTRLLVL

SEQ ID NO: 4087 - protein, 131 aa, Artificial Sequence
  Description of Artificial Sequence: Synthetic polypeptide
MSNQVLCCVVLCLLGANTVDGGITQSPKYLFRKEGQNVTLSCEQNLNHDAMYWYRQDPGQGLRLIYYSQIVNDFQKGDIAEGYSVSREKKESFPLTVTSAQKNPTAFYLCASSSGILYEQYFGPGTRLTVT

SEQ ID NO: 4088 - protein, 132 aa, Artificial Sequence
  Description of Artificial Sequence: Synthetic polypeptide
MGSRLLCWVLLCLLGAGPVKAGVTQTPRYLIKTRGQQVTLSCSPISGHRSVSWYQQTPGQGLQFLFEYFSETQRNKGNFPGRFSGRQFSNSRSEMNVSTLELGDSALYLCASSWTGTADEQYFGPGTRLTVT

SEQ ID NO: 4089 - protein, 132 aa, Artificial Sequence
  Description of Artificial Sequence: Synthetic polypeptide
MGSWTLCCVSLCILVAKHTDAGVIQSPRHEVTEMGQEVTLRCKPISGHDYLFWYRQTMMRGLELLIYFNNNVPIDDSGMPEDRFSAKMPNASFSTLKIQPSEPRDSAVYFCASSPTGNNEQFFGPGTRLTVL

SEQ ID NO: 4090 - protein, 131 aa, Artificial Sequence
  Description of Artificial Sequence: Synthetic polypeptide
MATRLLCCVVLCLLGEELIDARVTQTPRHKVTEMGQEVTMRCQPILGHNTVFWYRQTMMQGLELLAYFRNRAPLDDSGMPKDRFSAEMPDATLATLKIQPSEPRDSAVYFCASGFDIGELFFGEGSRLTVL

SEQ ID NO: 4091 - protein, 131 aa, Artificial Sequence
  Description of Artificial Sequence: Synthetic polypeptide
MGPQLLGYVVLCLLGAGPLEAQVTQNPRYLITVTGKKLTVTCSQNMNHEYMSWYRQDPGLGLRQIYYSMNVEVTDKGDVPEGYKVSRKEKRNFPLILESPSPNQTSLYFCASSQTHYNEQFFGPGTRLTVL

SEQ ID NO: 4092 - protein, 132 aa, Artificial Sequence
  Description of Artificial Sequence: Synthetic polypeptide
MSNQVLCCVVLCFLGANTVDGGITQSPKYLFRKEGQNVTLSCEQNLNHDAMYWYRQDPGQGLRLIYYSQIVNDFQKGDIAEGYSVSREKKESFPLTVTSAQKNPTAFYLCASSAGGGFTEAFFGQGTRLTVV

SEQ ID NO: 4093 - protein, 134 aa, Artificial Sequence
  Description of Artificial Sequence: Synthetic polypeptide
MGTSLLCWMALCLLGADHADTGVSQDPRHKITKRGQNVTFRCDPISEHNRLYWYRQTLGQGPEFLTYFQNEAQLEKSRLLSDRFSAERPKGSFSTLEIQRTEQGDSAMYLCASSPRDRVPGELFFGEGSRLTVL

SEQ ID NO: 4094 - protein, 134 aa, Artificial Sequence
  Description of Artificial Sequence: Synthetic polypeptide
MGTRLLCWAALCLLGAELTEAGVAQSPRYKIIEKRQSVAFWCNPISGHATLYWYQQILGQGPKLLIQFQNNGVVDDSQLPKDRFSAERLKGVDSTLKIQPAKLEDSAVYLCASSLDRGPQETQYFGPGTRLLVL

SEQ ID NO: 4095 - protein, 142 aa, Artificial Sequence
  Description of Artificial Sequence: Synthetic polypeptide
MLSPDLPDSAWNTRLLCRVMLCLLGAGSVAAGVIQSPRHLIKEKRETATLKCYPIPRHDTVYWYQQGPGQDPQFLISFYEKMQSDKGSIPDRFSAQQFSDYHSELNMSSLELGDSALYFCASSRTGDNYGYTFGSGTRLTVV

SEQ ID NO: 4096 - protein, 135 aa, Artificial Sequence
  Description of Artificial Sequence: Synthetic polypeptide
MGTRLLCWVAFCLLVEELIEAGVVQSPRYKIIEKKQPVAFWCNPISGHNTLYWYLQNLGQGPELLIRYENEEAVDDSQLPKDRFSAERLKGVDSTLKIQPAELGDSAVYLCASSPGGQGWEDTQYFGPGTRLTVL

SEQ ID NO: 4097 - protein, 131 aa, Artificial Sequence
  Description of Artificial Sequence: Synthetic polypeptide
MSNQVLCCVVLCLLGANTVDGGITQSPKYLFRKEGQNVTLSCEQNLNHDAMYWYRQDPGQGLRLIYYSQIVNDFQKGDIAEGYSVSREKKESFPLTVTSAQKNPTAFYLCASSLTGPTEAFFGQGTRLTVV

SEQ ID NO: 4098 - protein, 131 aa, Artificial Sequence
  Description of Artificial Sequence: Synthetic polypeptide
MGPQLLGYVVLCLLGAGPLEAQVTQNPRYLITVTGKKLTVTCSQNMNHEYMSWYRQDPGLGLRQIYYSMNVEVTDKGDVPEGYKVSRKEKRNFPLILESPSPNQTSLYFCASSLLGGDEQYFGPGTRLTVT

SEQ ID NO: 4099 - protein, 132 aa, Artificial Sequence
  Description of Artificial Sequence: Synthetic polypeptide
MDSWTFCCVSLCILVAKHTDAGVIQSPRHEVTEMGQEVTLRCKPISGHNSLFWYRQTMMRGLELLIYFNNNVPIDDSGMPEDRFSAKMPNASFSTLKIQPSEPRDSAVYFCASSLPSNEKLFFGSGTQLSVL

SEQ ID NO: 4100 - protein, 129 aa, Artificial Sequence
  Description of Artificial Sequence: Synthetic polypeptide
MGSWTLCCVSLCILVAKHTDAGVIQSPRHEVTEMGQEVTLRCKPISGHDYLFWYRQTMMRGLELLIYFNNNVPIDDSGMPEDRFSAKMPNASFSTLKIQPSEPRDSAVYFCASSSNEQFFGPGTRLTVL

SEQ ID NO: 4101 - protein, 131 aa, Artificial Sequence
  Description of Artificial Sequence: Synthetic polypeptide
MGCRLLCCAVLCLLGAVPIDTEVTQTPKHLVMGMTNKKSLKCEQHMGHRAMYWYKQKAKKPPELMFVYSYEKLSINESVPSRFSPECPNSSLLNLHLHALQPEDSALYLCASSTTSGYEQYFGPGTRLTVT

SEQ ID NO: 4102 - protein, 132 aa, Artificial Sequence
  Description of Artificial Sequence: Synthetic polypeptide
MSNQVLCCVVLCLLGANTVDGGITQSPKYLFRKEGQNVTLSCEQNLNHDAMYWYRQDPGQGLRLIYYSQIVNDFQKGDIAEGYSVSREKKESFPLTVTSAQKNPTAFYLCASSWTGTDYEQYFGPGTRLTVT

SEQ ID NO: 4103 - protein, 133 aa, Artificial Sequence
  Description of Artificial Sequence: Synthetic polypeptide
MGSWTLCCVSLCILVAKHTDAGVIQSPRHEVTEMGQEVTLRCKPISGHDYLFWYRQTMMRGLELLIYFNNNVPIDDSGMPEDRFSAKMPNASFSTLKIQPSEPRDSAVYFCASSFEGFSYEQYFGPGTRLTVT

SEQ ID NO: 4104 - protein, 133 aa, Artificial Sequence
  Description of Artificial Sequence: Synthetic polypeptide
MGSRLLCWVLLCLLGAGPVKAGVTQTPRYLIKTRGQQVTLSCSPISGHRSVSWYQQTPGQGLQFLFEYFSETQRNKGNFPGRFSGRQFSNSRSEMNVSTLELGDSALYLCASSFHLQGPYGYTFGSGTRLTVV

SEQ ID NO: 4105 - protein, 131 aa, Artificial Sequence
  Description of Artificial Sequence: Synthetic polypeptide
MGCRLLCCAVLCLLGAVPIDTEVTQTPKHLVMGMTNKKSLKCEQHMGHRAMYWYKQKAKKPPELMFVYSYEKLSINESVPSRFSPECPNSSLLNLHLHALQPEDSALYLCASSQVEGTEAFFGQGTRLTVV

SEQ ID NO: 4106 - protein, 131 aa, Artificial Sequence
  Description of Artificial Sequence: Synthetic polypeptide
MGTRLLCWVVLGFLGTDHTGAGVSQSPRYKVAKRGQDVALRCDPISGHVSLFWYQQALGQGPEFLTYFQNEAQLDKSGLPSDRFFAERPEGSVSTLKIQRTQQEDSAVYLCASSPLRPEAFFGQGTRLTVV

SEQ ID NO: 4107 - protein, 133 aa, Artificial Sequence
  Description of Artificial Sequence: Synthetic polypeptide
MGFRLLCCVAFCLLGAGPVDSGVTQTPKHLITATGQRVTLRCSPRSGDLSVYWYQQSLDQGLQFLIQYYNGEERAKGNILERFSAQQFPDLHSELNLSSLELGDSALYFCASNLGGTDGSPLHFGNGTRLTVT

SEQ ID NO: 4108 - protein, 133 aa, Artificial Sequence
  Description of Artificial Sequence: Synthetic polypeptide
MGCRLLCCAVLCLLGAVPIDTEVTQTPKHLVMGMTNKKSLKCEQHMGHRAMYWYKQKAKKPPELMFVYSYEKLSINESVPSRFSPECPNSSLLNLHLHALQPEDSALYLCASSQEAGRNYEQYFGPGTRLTVT

SEQ ID NO: 4109 - protein, 131 aa, Artificial Sequence
  Description of Artificial Sequence: Synthetic polypeptide
MSNQVLCCVVLCFLGANTVDGGITQSPKYLFRKEGQNVTLSCEQNLNHDAMYWYRQDPGQGLRLIYYSQIVNDFQKGDIAEGYSVSREKKESFPLTVTSAQKNPTAFYLCASSITAFYGYTFGSGTRLTVV

SEQ ID NO: 4110 - protein, 131 aa, Artificial Sequence
  Description of Artificial Sequence: Synthetic polypeptide
MGPGLLCWALLCLLGAGSVETGVTQSPTHLIKTRGQQVTLRCSSQSGHNTVSWYQQALGQGPQFIFQYYREEENGRGNFPPRFSGLQFPNYSSELNVNALELDDSALYLCASSRGLDTEAFFGQGTRLTVV

SEQ ID NO: 4111 - protein, 132 aa, Artificial Sequence
  Description of Artificial Sequence: Synthetic polypeptide
MGIRLLCRVAFCFLAVGLVDVKVTQSSRYLVKRTGEKVFLECVQDMDHENMFWYRQDPGLGLRLIYFSYDVKMKEKGDIPEGYSVSREKKERFSLILESASTNQTSMYLCASSLSVSDYEQYFGPGTRLTVT

SEQ ID NO: 4112 - protein, 134 aa, Artificial Sequence
  Description of Artificial Sequence: Synthetic polypeptide
MGTRLLCWVVLGFLGTDHTGAGVSQSPRYKVAKRGQDVALRCDPISGHVSLFWYQQALGQGPEFLTYFQNEAQLDKSGLPSDRFFAERPEGSVSTLKIQRTQQEDSAVYLCASSLGAQLHYGYTFGSGTRLTVV

SEQ ID NO: 4113 - protein, 133 aa, Artificial Sequence
  Description of Artificial Sequence: Synthetic polypeptide
MGCRLLCCVVFCLLQAGPLDTAVSQTPKYLVTQMGNDKSIKCEQNLGHDTMYWYKQDSKKFLKIMFSYNNKELIINETVPNRFSPKSPDKAHLNLHINSLELGDSAVYFCASSHRGGVTDTQYFGPGTRLTVL

SEQ ID NO: 4114 - protein, 135 aa, Artificial Sequence
  Description of Artificial Sequence: Synthetic polypeptide
MSIGLLCCAALSLLWAGPVNAGVTQTPKFQVLKTGQSMTLQCAQDMNHEYMSWYRQDPGMGLRLIHYSVGAGITDQGEVPNGYNVSRSTTEDFPLRLLSAAPSQTSVYFCASSYSGGASSYNEQFFGPGTRLTVL

SEQ ID NO: 4115 - protein, 133 aa, Artificial Sequence
  Description of Artificial Sequence: Synthetic polypeptide
MGPQLLGYVVLCLLGAGPLEAQVTQNPRYLITVTGKKLTVTCSQNMNHEYMSWYRQDPGLGLRQIYYSMNVEVTDKGDVPEGYKVSRKEKRNFPLILESPSPNQTSLYFCASSLAETSTDTQYFGPGTRLTVL

SEQ ID NO: 4116 - protein, 131 aa, Artificial Sequence
  Description of Artificial Sequence: Synthetic polypeptide
MGCRLLCCAVLCLLGAVPIDTEVTQTPKHLVMGMTNKKSLKCEQHMGHRAMYWYKQKAKKPPELMFVYSYEKLSINESVPSRFSPECPNSSLLNLHLHALQPEDSALYLCASSQFAGGPQYFGPGTRLTVL

SEQ ID NO: 4117 - protein, 132 aa, Artificial Sequence
  Description of Artificial Sequence: Synthetic polypeptide
MGIRLLCRVAFCFLAVGLVDVKVTQSSRYLVKRTGEKVFLECVQDMDHENMFWYRQDPGLGLRLIYFSYDVKMKEKGDIPEGYSVSREKKERFSLILESASTNQTSMYLCASSPRGGRQPQHFGDGTRLSIL

SEQ ID NO: 4118 - protein, 129 aa, Artificial Sequence
  Description of Artificial Sequence: Synthetic polypeptide
MGPRLLFWALLCLLGTGPVEAGVTQSPTHLIKTRGQQATLRCSPISGHTSVYWYQQALGLGLQFLLWYDEGEERNRGNFPPRFSGRQFPNYSSELNVNALELEDSALYLCASKLGGGAFFGQGTRLTVV

SEQ ID NO: 4119 - protein, 131 aa, Artificial Sequence
  Description of Artificial Sequence: Synthetic polypeptide
MGTSLLCWVVLGFLGTDHTGAGVSQSPRYKVTKRGQDVALRCDPISGHVSLYWYRQALGQGPEFLTYFNYEAQQDKSGLPNDRFSAERPEGSISTLTIQRTEQRDSAMYRCASRDVGYEQYFGPGTRLTVT

SEQ ID NO: 4120 - protein, 134 aa, Artificial Sequence
  Description of Artificial Sequence: Synthetic polypeptide
MGTRLLCWVVLGFLGTDHTGAGVSQSPRYKVAKRGQDVALRCDPISGHVSLFWYQQALGQGPEFLTYFQNEAQLDKSGLPSDRFFAERPEGSVSTLKIQRTQQEDSAVYLCASSPDRGRNYGYTFGSGTRLTVV

SEQ ID NO: 4121 - protein, 129 aa, Artificial Sequence
  Description of Artificial Sequence: Synthetic polypeptide
MLLLLLLLGPGSGLGAVVSQHPSWVICKSGTSVKIECRSLDFQATTMFWYRQFPKQSLMLMATSNEGSKATYEQGVEKDKFLINHASLTLSTLTVTSAHPEDSSFYICSAKRASYNEQFFGPGTRLTVL

SEQ ID NO: 4122 - protein, 137 aa, Artificial Sequence
  Description of Artificial Sequence: Synthetic polypeptide
MATRLLCCVVLCLLGEELIDARVTQTPRHKVTEMGQEVTMRCQPILGHNTVFWYRQTMMQGLELLAYFRNRAPLDDSGMPKDRFSAEMPDATLATLKIQPSEPRDSAVYFCASGLPPAGGPSYNEQFFGPGTRLTVL

SEQ ID NO: 4123 - protein, 135 aa, Artificial Sequence
  Description of Artificial Sequence: Synthetic polypeptide
MGFRLLCCVAFCLLGAGPVDSGVTQTPKHLITATGQRVTLRCSPRSGDLSVYWYQQSLDQGLQFLIQYYNGEERAKGNILERFSAQQFPDLHSELNLSSLELGDSALYFCASSVAATSGGTDTQYFGPGTRLTVL

SEQ ID NO: 4124 - protein, 134 aa, Artificial Sequence
  Description of Artificial Sequence: Synthetic polypeptide
MGPQLLGYVVLCLLGAGPLEAQVTQNPRYLITVTGKKLTVTCSQNMNHEYMSWYRQDPGLGLRQIYYSMNVEVTDKGDVPEGYKVSRKEKRNFPLILESPSPNQTSLYFCASSLYGRGVTDTQYFGPGTRLTVL

SEQ ID NO: 4125 - protein, 132 aa, Artificial Sequence
  Description of Artificial Sequence: Synthetic polypeptide
MSIGLLCCAALSLLWAGPVNAGVTQTPKFQVLKTGQSMTLQCAQDMNHEYMSWYRQDPGMGLRLIHYSVGAGITDQGEVPNGYNVSRSTTEDFPLRLLSAAPSQTSVYFCASSYSPGRSGYTFGSGTRLTVV

SEQ ID NO: 4126 - protein, 134 aa, Artificial Sequence
  Description of Artificial Sequence: Synthetic polypeptide
MGTSLLCWMALCLLGADHADTGVSQDPRHKITKRGQNVTFRCDPISEHNRLYWYRQTLGQGPEFLTYFQNEAQLEKSRLLSDRFSAERPKGSFSTLEIQRTEQGDSAMYLCASSLETGGHQPQHFGDGTRLSIL

SEQ ID NO: 4127 - protein, 133 aa, Artificial Sequence
  Description of Artificial Sequence: Synthetic polypeptide
MGSRLLCWVLLCLLGAGPVKAGVTQTPRYLIKTRGQQVTLSCSPISGHRSVSWYQQTPGQGLQFLFEYFSETQRNKGNFPGRFSGRQFSNSRSEMNVSTLELGDSALYLCASSWGDRATDTQYFGPGTRLTVL

SEQ ID NO: 4128 - protein, 133 aa, Artificial Sequence
  Description of Artificial Sequence: Synthetic polypeptide
MGSRLLCWVLLCLLGAGPVKAGVTQTPRYLIKTRGQQVTLSCSPISGHRSVSWYQQTPGQGLQFLFEYFSETQRNKGNFPGRFSGRQFSNSRSEMNVSTLELGDSALYLCASSLGADRNTEAFFGQGTRLTVV

SEQ ID NO: 4129 - protein, 134 aa, Artificial Sequence
  Description of Artificial Sequence: Synthetic polypeptide
MGTSLLCWVVLGFLGTDHTGAGVSQSPRYKVTKRGQDVALRCDPISGHVSLYWYRQALGQGPEFLTYFNYEAQQDKSGLPNDRFSAERPEGSISTLTIQRTEQRDSAMYRCASSLDRNSGNTIYFGEGSWLTVV

SEQ ID NO: 4130 - protein, 134 aa, Artificial Sequence
  Description of Artificial Sequence: Synthetic polypeptide
MGSRLLCWVLLCLLGAGPVKAGVTQTPRYLIKTRGQQVTLSCSPISGHRSVSWYQQTPGQGLQFLFEYFSETQRNKGNFPGRFSGRQFSNSRSEMNVSTLELGDSALYLCASSSRGQGASGEQYFGPGTRLTVT

SEQ ID NO: 4131 - protein, 138 aa, Artificial Sequence
  Description of Artificial Sequence: Synthetic polypeptide
MRSWPGPEMGTRLFFYVALCLLWTGHVDAGITQSPRHKVTETGTPVTLRCHQTENHRYMYWYRQDPGHGLRLIHYSYGVKDTDKGEVSDGYSVSRSKTEDFLLTLESATSSQTSVYFCALRDLYNEQFFGPGTRLTVL

SEQ ID NO: 4132 - protein, 136 aa, Artificial Sequence
  Description of Artificial Sequence: Synthetic polypeptide
MVSRLLSLVSLCLLGAKHIEAGVTQFPSHSVIEKGQTVTLRCDPISGHDNLYWYRRVMGKEIKFLLHFVKESKQDESGMPNNRFLAERTGGTYSTLKVQPAELEDSGVYFCASSHGTGGWFDYGYTFGSGTRLTVV

SEQ ID NO: 4133 - protein, 135 aa, Artificial Sequence
  Description of Artificial Sequence: Synthetic polypeptide
MGTSLLCWMALCLLGADHADTGVSQNPRHKITKRGQNVTFRCDPISEHNRLYWYRQTLGQGPEFLTYFQNEAQLEKSRLLSDRFSAERPKGSFSTLEIQRTEQGDSAMYLCASSFQTGWEFYGYTFGSGTRLTVV

SEQ ID NO: 4134 - protein, 128 aa, Artificial Sequence
  Description of Artificial Sequence: Synthetic polypeptide
MLSLLLLLLGLGSVFSAVISQKPSRDICQRGTSLTIQCQVDSQVTMMFWYRQQPGQSLTLIATANQGSEATYESGFVIDKFPISRPNLTFSTLTVSNMSPEDSSIYLCSVYTENTEAFFGQGTRLTVV

SEQ ID NO: 4135 - protein, 133 aa, Artificial Sequence
  Description of Artificial Sequence: Synthetic polypeptide
MASLLFFCGAFYLLGTGSMDADVTQTPRNRITKTGKRIMLECSQTKGHDRMYWYRQDPGLGLRLIYYSFDVKDINKGEISDGYSVSRQAQAKFSLSLESAIPNQTALYFCATSDQNRGHEKLFFGSGTQLSVL

SEQ ID NO: 4136 - protein, 133 aa, Artificial Sequence
  Description of Artificial Sequence: Synthetic polypeptide
MGPQLLGYVVLCLLGAGPLEAQVTQNPRYLITVTGKKLTVTCSQNMNHEYMSWYRQDPGLGLRQIYYSMNVEVTDKGDVPEGYKVSRKEKRNFPLILESPSPNQTSLYFCASSIMGTAYYGYTFGSGTRLTVV

SEQ ID NO: 4137 - protein, 132 aa, Artificial Sequence
  Description of Artificial Sequence: Synthetic polypeptide
MGFRLLCCVAFCLLGAGPVDSGVTQTPKHLITATGQRVTLRCSPRSGDLSVYWYQQSLDQGLQFLIQYYNGEERAKGNILERFSAQQFPDLHSELNLSSLELGDSALYFCASSVGDRGYEQYFGPGTRLTVT

SEQ ID NO: 4138 - protein, 131 aa, Artificial Sequence
  Description of Artificial Sequence: Synthetic polypeptide
MGFRLLCCVAFCLLGAGPVDSGVTQTPKHLITATGQRVTLRCSPRSGDLSVYWYQQSLDQGLQFLIQYYNGEERAKGNILERFSAQQFPDLHSELNLSSLELGDSALYFCASSVGGWTEAFFGQGTRLTVV

SEQ ID NO: 4139 - protein, 130 aa, Artificial Sequence
  Description of Artificial Sequence: Synthetic polypeptide
MSNQVLCCVVLCFLGANTVDGGITQSPKYLFRKEGQNVTLSCEQNLNHDAMYWYRQDPGQGLRLIYYSQIVNDFQKGDIAEGYSVSREKKESFPLTVTSAQKNPTAFYLCATEGAYEKLFFGSGTQLSVL

SEQ ID NO: 4140 - protein, 131 aa, Artificial Sequence
  Description of Artificial Sequence: Synthetic polypeptide
MGSRLLCWVLLCLLGAGPVKAGVTQTPRYLIKTRGQQVTLSCSPISGHRSVSWYQQTPGQGLQFLFEYFSETQRNKGNFPGRFSGRQFSNSRSEMNVSTLELGDSALYLCASSQGPTGEQYFGPGTRLTVT

SEQ ID NO: 4141 - protein, 134 aa, Artificial Sequence
  Description of Artificial Sequence: Synthetic polypeptide
MGPQLLGYVVLCLLGAGPLEAQVTQNPRYLITVTGKKLTVTCSQNMNHEYMSWYRQDPGLGLRQIYYSMNVEVTDKGDVPEGYKVSRKEKRNFPLILESPSPNQTSLYFCASSRTSGGAPGELFFGEGSRLTVL

SEQ ID NO: 4142 - protein, 134 aa, Artificial Sequence
  Description of Artificial Sequence: Synthetic polypeptide
MGTRLLFWVAFCLLGAYHTGAGVSQSPSNKVTEKGKDVELRCDPISGHTALYWYRQRLGQGLEFLIYFQGNSAPDKSGLPSDRFSAERTGESVSTLTIQRTQQEDSAVYLCASSHPLSGGYEQFFGPGTRLTVL

SEQ ID NO: 4143 - protein, 128 aa, Artificial Sequence
  Description of Artificial Sequence: Synthetic polypeptide
MGSRLLCWVLLCLLGAGPVKAGVTQTPRYLIKTRGQQVTLSCSPISGHRSVSWYQQTPGQGLQFLFEYFSETQRNKGNFPGRFSGRQFSNSRSEMNVSTLELGDSALYLCASSGTEAFFGQGTRLTVV

SEQ ID NO: 4144 - protein, 132 aa, Artificial Sequence
  Description of Artificial Sequence: Synthetic polypeptide
MSISLLCCAAFPLLWAGPVNAGVTQTPKFRILKIGQSMTLQCTQDMNHNYMYWYRQDPGMGLKLIYYSVGAGITDKGEVPNGYNVSRSTTEDFPLRLELAAPSQTSVYFCASLGQGNNQPQHFGDGTRLSIL

SEQ ID NO: 4145 - protein, 132 aa, Artificial Sequence
  Description of Artificial Sequence: Synthetic polypeptide
MGSRLLCWVLLCLLGAGPVKAGVTQTPRYLIKTRGQQVTLSCSPISGHRSVSWYQQTPGQGLQFLFEYFSETQRNKGNFPGRFSGRQFSNSRSEMNVSTLELGDSALYLCASSLDRAGKTQYFGPGTRLLVL

SEQ ID NO: 4146 - protein, 132 aa, Artificial Sequence
  Description of Artificial Sequence: Synthetic polypeptide
MGPQLLGYVVLCLLGAGPLEAQVTQNPRYLITVTGKKLTVTCSQNMNHEYMSWYRQDPGLGLRQIYYSMNVEVTDKGDVPEGYKVSRKEKRNFPLILESPSPNQTSLYFCASSLAGSYNEQFFGPGTRLTVL

SEQ ID NO: 4147 - protein, 130 aa, Artificial Sequence
  Description of Artificial Sequence: Synthetic polypeptide
MGFRLLCCVAFCLLGAGPVDSGVTQTPKHLITATGQRVTLRCSPRSGDLSVYWYQQSLDQGLQFLIQYYNGEERAKGNILERFSAQQFPDLHSELNLSSLELGDSALYFCASSVGDHTIYFGEGSWLTVV

SEQ ID NO: 4148 - protein, 133 aa, Artificial Sequence
  Description of Artificial Sequence: Synthetic polypeptide
MGFRLLCCVAFCLLGAGPVDSGVTQTPKHLITATGQRVTLRCSPRSGDLSVYWYQQSLDQGLQFLIQYYNGEERAKGNILERFSAQQFPDLHSELNLSSLELGDSALYFCASSVEGDVWEEAFFGQGTRLTVV

SEQ ID NO: 4149 - protein, 135 aa, Artificial Sequence
  Description of Artificial Sequence: Synthetic polypeptide
MGTSLLCWMALCLLGADHADTGVSQNPRHKITKRGQNVTFRCDPISEHNRLYWYRQTLGQGPEFLTYFQNEAQLEKSRLLSDRFSAERPKGSFSTLEIQRTEQGDSAMYLCASSGSLGQMNTEAFFGQGTRLTVV

SEQ ID NO: 4150 - protein, 132 aa, Artificial Sequence
  Description of Artificial Sequence: Synthetic polypeptide
MGPQLLGYVVLCLLGAGPLEAQVTQNPRYLITVTGKKLTVTCSQNMNHEYMSWYRQDPGLGLRQIYYSMNVEVTDKGDVPEGYKVSRKEKRNFPLILESPSPNQTSLYFCASSWTGRNQPQHFGDGTRLSIL

SEQ ID NO: 4151 - protein, 132 aa, Artificial Sequence
  Description of Artificial Sequence: Synthetic polypeptide
MSTRLLCWMALCLLGAELSEAEVAQSPRYKITEKSQAVAFWCDPISGHATLYWYRQILGQGPELLVQFQDESVVDDSQLPKDRFSAERLKGVDSTLKIQPAELGDSAMYLCASSFYRANEQFFGPGTRLTVL

SEQ ID NO: 4152 - protein, 132 aa, Artificial Sequence
  Description of Artificial Sequence: Synthetic polypeptide
MGTRLLCWVVLGFLGTDHTGAGVSQSPRYKVAKRGQDVALRCDPISGHVSLFWYQQALGQGPEFLTYFQNEAQLDKSGLPSDRFFAERPEGSVSTLKIQRTQQEDSAVYLCASSSSGGYEQYFGPGTRLTVT

SEQ ID NO: 4153 - protein, 131 aa, Artificial Sequence
  Description of Artificial Sequence: Synthetic polypeptide
MGTSLLCWMALCLLGADHADTGVSQDPRHKITKRGQNVTFRCDPISEHNRLYWYRQTLGQGPEFLTYFQNEAQLEKSRLLSDRFSAERPKGSFSTLEIQRTEQGDSAMYLCASTGRNTEAFFGQGTRLTVV

SEQ ID NO: 4154 - protein, 133 aa, Artificial Sequence
  Description of Artificial Sequence: Synthetic polypeptide
MGTRLLCWAALCLLGAELTEAGVAQSPRYKIIEKRQSVAFWCNPISGHATLYWYQQILGQGPKLLIQFQNNGVVDDSQLPKDRFSAERLKGVDSTLKIQPAKLEDSAVYLCASSLGEFYNEQFFGPGTRLTVL

SEQ ID NO: 4155 - protein, 132 aa, Artificial Sequence
  Description of Artificial Sequence: Synthetic polypeptide
MSIGLLCCAALSLLWAGPVNAGVTQTPKFQVLKTGQSMTLQCAQDMNHEYMSWYRQDPGMGLRLIHYSVGAGITDQGEVPNGYNVSRSTTEDFPLRLLSAAPSQTSVYFCASGRTGLYTEAFFGQGTRLTVV

SEQ ID NO: 4156 - protein, 132 aa, Artificial Sequence
  Description of Artificial Sequence: Synthetic polypeptide
MASLLFFCGAFYLLGTGSMDADVTQTPRNRITKTGKRIMLECSQTKGHDRMYWYRQDPGLGLRLIYYSFDVKDINKGEISDGYSVSRQAQAKFSLSLESAIPNQTALYFCATSEAGMNTEAFFGQGTRLTVV

SEQ ID NO: 4157 - protein, 131 aa, Artificial Sequence
  Description of Artificial Sequence: Synthetic polypeptide
MLLLLLLLGPGSGLGAVVSQHPSRVICKSGTSVKIECRSLDFQATTMFWYRQFPKQSLMLMATSNEGSKATYEQGVEKDKFLINHASLTLSTLTVTSAHPEDSSFYICSARDHTSGTYEQYFGPGTRLTVT

SEQ ID NO: 4158 - protein, 133 aa, Artificial Sequence
  Description of Artificial Sequence: Synthetic polypeptide
MSIGLLCCVAFSLLWASPVNAGVTQTPKFQVLKTGQSMTLQCAQDMNHNSMYWYRQDPGMGLRLIYYSASEGTTDKGEVPNGYNVSRLNKREFSLRLESAAPSQTSVYFCASSEGINLSYEQYFGPGTRLTVT

SEQ ID NO: 4159 - protein, 133 aa, Artificial Sequence
  Description of Artificial Sequence: Synthetic polypeptide
MGTSLLCWMALCLLGADHADTGVSQDPRHKITKRGQNVTFRCDPISEHNRLYWYRQTLGQGPEFLTYFQNEAQLEKSRLLSDRFSAERPKGSFSTLEIQRTEQGDSAMYLCASSPQPTNSPLHFGNGTRLTVT

SEQ ID NO: 4160 - protein, 133 aa, Artificial Sequence
  Description of Artificial Sequence: Synthetic polypeptide
MGTSLLCWMALCLLGADHADTGVSQDPRHKITKRGQNVTFRCDPISEHNRLYWYRQTLGQGPEFLTYFQNEAQLEKSRLLSDRFSAERPKGSFSTLEIQRTEQGDSAMYLCASSSTASSYEQYFGPGTRLTVT

SEQ ID NO: 4161 - protein, 133 aa, Artificial Sequence
  Description of Artificial Sequence: Synthetic polypeptide
MGTRLLCWVVLGFLGTDHTGAGVSQSPRYKVAKRGQDVALRCDPISGHVSLFWYQQALGQGPEFLTYFQNEAQLDKSGLPSDRFFAERPEGSVSTLKIQRTQQEDSAVYLCASSTGTRGNEQFFGPGTRLTVL

SEQ ID NO: 4162 - protein, 133 aa, Artificial Sequence
  Description of Artificial Sequence: Synthetic polypeptide
MGPQLLGYVVLCLLGAGPLEAQVTQNPRYLITVTGKKLTVTCSQNMNHEYMSWYRQDPGLGLRQIYYSMNVEVTDKGDVPEGYKVSRKEKRNFPLILESPSPNQTSLYFCASSSGQLAKNIQYFGAGTRLSVL

SEQ ID NO: 4163 - protein, 133 aa, Artificial Sequence
  Description of Artificial Sequence: Synthetic polypeptide
MGFRLLCCVAFCLLGAGPVDSGVTQTPKHLITATGQRVTLRCSPRSGDLSVYWYQQSLDQGLQFLIQYYNGEERAKGNILERFSAQQFPDLHSELNLSSLELGDSALYFCASSPPETGGLEQYFGPGTRLTVT

SEQ ID NO: 4164 - protein, 133 aa, Artificial Sequence
  Description of Artificial Sequence: Synthetic polypeptide
MGPQLLGYVVLCLLGAGPLEAQVTQNPRYLITVTGKKLTVTCSQNMNHEYMSWYRQDPGLGLRQIYYSMNVEVTDKGDVPEGYKVSRKEKRNFPLILESPSPNQTSLYFCASSLRQPTNEKLFFGSGTQLSVL

SEQ ID NO: 4165 - protein, 132 aa, Artificial Sequence
  Description of Artificial Sequence: Synthetic polypeptide
MGFRLLCCVAFCLLGAGPVDSGVTQTPKHLITATGQRVTLRCSPRSGDLSVYWYQQSLDQGLQFLIQYYNGEERAKGNILERFSAQQFPDLHSELNLSSLELGDSALYFCASSVGGGTDTQYFGPGTRLTVL

SEQ ID NO: 4166 - protein, 127 aa, Artificial Sequence
  Description of Artificial Sequence: Synthetic polypeptide
MLSLLLLLLGLGSVFSAVISQKPSRDICQRGTSLTIQCQVDSQVTMMFWYRQQPGQSLTLIATANQGSEATYESGFVIDKFPISRPNLTFSTLTVSNMSPEDSSIYLCRAAIESGYTFGSGTRLTVV

SEQ ID NO: 4167 - protein, 127 aa, Artificial Sequence
  Description of Artificial Sequence: Synthetic polypeptide
MLCSLLALLLGTFFGVRSQTIHQWPATLVQPVGSPLSLECTVEGTSNPNLYWYRQAAGRGLQLLFYSVGIGQISSEVPQNLSASRPQDRQFILSSKKLLLSDSGFYLCAWKIQGVEFFGPGTRLTVL

SEQ ID NO: 4168 - protein, 130 aa, Artificial Sequence
  Description of Artificial Sequence: Synthetic polypeptide
MLLLLLLLGPGSGLGAVVSQHPSRVICKSGTSVKIECRSLDFQATTMFWYRQFPKQSLMLMATSNEGSKATYEQGVEKDKFLINHASLTLSTLTVTSAHPEDSSFYICSARAWGGNTEAFFGQGTRLTVV

SEQ ID NO: 4169 - protein, 133 aa, Artificial Sequence
  Description of Artificial Sequence: Synthetic polypeptide
MGFRLLCCVAFCLLGAGPVDSGVTQTPKHLITATGQRVTLRCSPRSGDLSVYWYQQSLDQGLQFLIQYYNGEERAKGNILERFSAQQFPDLHSELNLSSLELGDSALYFCASSVGTSGVKELFFGEGSRLTVL

SEQ ID NO: 4170 - protein, 134 aa, Artificial Sequence
  Description of Artificial Sequence: Synthetic polypeptide
MGPQLLGYVVLCLLGAGPLEAQVTQNPRYLITVTGKKLTVTCSQNMNHEYMSWYRQDPGLGLRQIYYSMNVEVTDKGDVPEGYKVSRKEKRNFPLILESPSPNQTSLYFCASSLRGGPANYGYTFGSGTRLTVV

SEQ ID NO: 4171 - protein, 132 aa, Artificial Sequence
  Description of Artificial Sequence: Synthetic polypeptide
MGTRLLCWVAFCLLVEELIEAGVVQSPRYKIIEKKQPVAFWCNPISGHNTLYWYLQNLGQGPELLIRYENEEAVDDSQLPKDRFSAERLKGVDSTLKIQPAELGDSAVYLCASSPGFTGELFFGEGSRLTVL

SEQ ID NO: 4172 - protein, 132 aa, Artificial Sequence
  Description of Artificial Sequence: Synthetic polypeptide
MGPGLLCWALLCLLGAGLVDAGVTQSPTHLIKTRGQQVTLRCSPKSGHDTVSWYQQALGQGPQFIFQYYEEEERQRGNFPDRFSGHQFPNYSSELNVNALLLGDSALYLCASSLGQSWYGYTFGSGTRLTVV

SEQ ID NO: 4173 - protein, 132 aa, Artificial Sequence
  Description of Artificial Sequence: Synthetic polypeptide
MGPGLLCWALLCLLGAGLVDAGVTQSPTHLIKTRGQQVTLRCSPKSGHDTVSWYQQALGQGPQFIFQYYEEEERQRGNFPDRFSGHQFPNYSSELNVNALLLGDSALYLCASSWKISSYEQYFGPGTRLTVT

SEQ ID NO: 4174 - protein, 133 aa, Artificial Sequence
  Description of Artificial Sequence: Synthetic polypeptide
MDTWLVCWAIFSLLKAGLTEPEVTQTPSHQVTQMGQEVILRCVPISNHLYFYWYRQILGQKVEFLVSFYNNEISEKSEIFDDQFSVERPDGSNFTLKIRSTKLEDSAMYFCASRGLAGPYEQYFGPGTRLTVT

SEQ ID NO: 4175 - protein, 133 aa, Artificial Sequence
  Description of Artificial Sequence: Synthetic polypeptide
MLLLLLLLGPGSGLGAVVSQHPSRVICKSGTSVKIECRSLDFQATTMFWYRQFPKQSLMLMATSNEGSKATYEQGVEKDKFLINHASLTLSTLTVTSAHPEDSSFYICSGRGLADEWGSYEQYFGPGTRLTVT

SEQ ID NO: 4176 - protein, 131 aa, Artificial Sequence
  Description of Artificial Sequence: Synthetic polypeptide
MGSRLLCWVLLCLLGAGPVKAGVTQTPRYLIKTRGQQVTLSCSPISGHRSVSWYQQTPGQGLQFLFEYFSETQRNKGNFPGRFSGRQFSNSRSEMNVSTLELGDSALYLCASSLGQGDRYTFGSGTRLTVV

SEQ ID NO: 4177 - protein, 134 aa, Artificial Sequence
  Description of Artificial Sequence: Synthetic polypeptide
MGTSLLCWMALCLLGADHADTGVSQNPRHKITKRGQNVTFRCDPISEHNRLYWYRQTLGQGPEFLTYFQNEAQLEKSRLLSDRFSAERPKGSFSTLEIQRTEQGDSAMYLCASSTGQGAYNEQFFGPGTRLTVL

SEQ ID NO: 4178 - protein, 131 aa, Artificial Sequence
  Description of Artificial Sequence: Synthetic polypeptide
MLLLLLLLGPGSGLGAVVSQHPSWVICKSGTSVKIECRSLDFQATTMFWYRQFPKQSLMLMATSNEGSKATYEQGVEKDKFLINHASLTLSTLTVTSAHPEDSSFYICSARDNVGGRTEAFFGQGTRLTVV

SEQ ID NO: 4179 - protein, 131 aa, Artificial Sequence
  Description of Artificial Sequence: Synthetic polypeptide
MLSLLLLLLGLGSVFSAVISQKPSRDICQRGTSLTIQCQVDSQVTMMFWYRQQPGQSLTLIATANQGSEATYESGFVIDKFPISRPNLTFSTLTVSNMSPEDSSIYLCSVERRAGGLNEQFFGPGTRLTVL

SEQ ID NO: 4180 - protein, 132 aa, Artificial Sequence
  Description of Artificial Sequence: Synthetic polypeptide
MGPGLLHWMALCLLGTGHGDAMVIQNPRYQVTQFGKPVTLSCSQTLNHNVMYWYQQKSSQAPKLLFHYYDKDFNNEADTPDNFQSRRPNTSFCFLDIRSPGLGDAAMYLCATSGSGVPDTQYFGPGTRLTVL

SEQ ID NO: 4181 - protein, 133 aa, Artificial Sequence
  Description of Artificial Sequence: Synthetic polypeptide
MGSWTLCCVSLCILVAKHTDAGVIQSPRHEVTEMGQEVTLRCKPISGHDYLFWYRQTMMRGLELLIYFNNNVPIDDSGMPEDRFSAKMPNASFSTLKIQPSEPRDSAVYFCASSTGLAEYEQFFGPGTRLTVL

SEQ ID NO: 4182 - protein, 133 aa, Artificial Sequence
  Description of Artificial Sequence: Synthetic polypeptide
MGPQLLGYVVLCLLGAGPLEAQVTQNPRYLITVTGKKLTVTCSQNMNHEYMSWYRQDPGLGLRQIYYSMNVEVTDKGDVPEGYKVSRKEKRNFPLILESPSPNQTSLYFCASSLRGVSVYEQYFGPGTRLTVT

SEQ ID NO: 4183 - protein, 134 aa, Artificial Sequence
  Description of Artificial Sequence: Synthetic polypeptide
MGPQLLGYVVLCLLGAGPLEAQVTQNPRYLITVTGKKLTVTCSQNMNHEYMSWYRQDPGLGLRQIYYSMNVEVTDKGDVPEGYKVSRKEKRNFPLILESPSPNQTSLYFCASSLSLIAGANVLTFGAGSRLTVL

SEQ ID NO: 4184 - protein, 133 aa, Artificial Sequence
  Description of Artificial Sequence: Synthetic polypeptide
MDTWLVCWAIFSLLKAGLTEPEVTQTPSHQVTQMGQEVILRCVPISNHLYFYWYRQILGQKVEFLVSFYNNEISEKSEIFDDQFSVERPDGSNFTLKIRSTKLEDSAMYFCASSEAGADYGYTFGSGTRLTVV

SEQ ID NO: 4185 - protein, 132 aa, Artificial Sequence
  Description of Artificial Sequence: Synthetic polypeptide
MGPGLLCWVLLCLLGAGSVETGVTQSPTHLIKTRGQQVTLRCSSQSGHNTVSWYQQALGQGPQFIFQYYREEENGRGNFPPRFSGLQFPNYSSELNVNALELDDSALYLCASSHGNVGYEQYFGPGTRLTVT

SEQ ID NO: 4186 - protein, 130 aa, Artificial Sequence
  Description of Artificial Sequence: Synthetic polypeptide
MGPGLLHWMALCLLGTGHGDAMVIQNPRYQVTQFGKPVTLSCSQTLNHNVMYWYQQKSSQAPKLLFHYYDKDFNNEADTPDNFQSRRPNTSFCFLDIRSPGLGDAAMYLCATSGGTGELFFGEGSRLTVL

SEQ ID NO: 4187 - protein, 136 aa, Artificial Sequence
  Description of Artificial Sequence: Synthetic polypeptide
MGPQLLGYVVLCLLGAGPLEAQVTQNPRYLITVTGKKLTVTCSQNMNHEYMSWYRQDPGLGLRQIYYSMNVEVTDKGDVPEGYKVSRKEKRNFPLILESPSPNQTSLYFCASRSTGTGGAGGEPQHFGDGTRLSIL

SEQ ID NO: 4188 - protein, 130 aa, Artificial Sequence
  Description of Artificial Sequence: Synthetic polypeptide
MTIRLLCYVGFYFLGAGLMEADIYQTPRYLVIGTGKKITLECSQTMGHDKMYWYQQDPGMELHLIHYSYGVNSTEKGDLSSESTVSRIRTEHFPLTLESARPSHTSQYLCASSLTGYEQYFGPGTRLTVT

SEQ ID NO: 4189 - protein, 134 aa, Artificial Sequence
  Description of Artificial Sequence: Synthetic polypeptide
MGSRLLCWVLLCLLGAGPVKAGVTQTPRYLIKTRGQQVTLSCSPISGHRSVSWYQQTPGQGLQFLFEYFSETQRNKGNFPGRFSGRQFSNSRSEMNVSTLELGDSALYLCASSLDRASSYNEQFFGPGTRLTVL

SEQ ID NO: 4190 - protein, 133 aa, Artificial Sequence
  Description of Artificial Sequence: Synthetic polypeptide
MDTWLVCWAIFSLLKAGLTEPEVTQTPSHQVTQMGQEVILRCVPISNHLYFYWYRQILGQKVEFLVSFYNNEISEKSEIFDDQFSVERPDGSNFTLKIRSTKLEDSAMYFCASRGLTGGTEAFFGQGTRLTVV

SEQ ID NO: 4191 - protein, 132 aa, Artificial Sequence
  Description of Artificial Sequence: Synthetic polypeptide
MGPQLLGYVVLCLLGAGPLEAQVTQNPRYLITVTGKKLTVTCSQNMNHEYMSWYRQDPGLGLRQIYYSMNVEVTDKGDVPEGYKVSRKEKRNFPLILESPSPNQTSLYFCASSLRNPNTEAFFGQGTRLTVV

SEQ ID NO: 4192 - protein, 133 aa, Artificial Sequence
  Description of Artificial Sequence: Synthetic polypeptide
MGTSLLCWVVLGFLGTDHTGAGVSQSPRYKVTKRGQDVALRCDPISGHVSLYWYRQALGQGPEFLTYFNYEAQQDKSGLPNDRFSAERPEGSISTLTIQRTEQRDSAMYRCASSLVGNTGELFFGEGSRLTVL

SEQ ID NO: 4193 - protein, 132 aa, Artificial Sequence
  Description of Artificial Sequence: Synthetic polypeptide
MLLLLLLLGPGSGLGAVVSQHPSWVICKSGTSVKIECRSLDFQATTMFWYRQFPKQSLMLMATSNEGSKATYEQGVEKDKFLINHASLTLSTLTVTSAHPEDSSFYICSARDEDRGLQETQYFGPGTRLLVL

SEQ ID NO: 4194 - protein, 132 aa, Artificial Sequence
  Description of Artificial Sequence: Synthetic polypeptide
MGCRLLCCAVLCLLGAVPIDTEVTQTPKHLVMGMTNKKSLKCEQHMGHRAMYWYKQKAKKPPELMFVYSYEKLSINESVPSRFSPECPNSSLLNLHLHALQPEDSALYLCASSQDQVRETQYFGPGTRLLVL

SEQ ID NO: 4195 - protein, 132 aa, Artificial Sequence
  Description of Artificial Sequence: Synthetic polypeptide
MGSRLLCWVLLCLLGAGPVKAGVTQTPRYLIKTRGQQVTLSCSPISGHRSVSWYQQTPGQGLQFLFEYFSETQRNKGNFPGRFSGRQFSNSRSEMNVSTLELGDSALYLCASSLAGLDTEAFFGQGTRLTVV

SEQ ID NO: 4196 - protein, 134 aa, Artificial Sequence
  Description of Artificial Sequence: Synthetic polypeptide
MGPGLLCWALLCLLGAGLVDAGVTQSPTHLIKTRGQQVTLRCSPKSGHDTVSWYQQALGQGPQFIFQYYEEEERQRGNFPDRFSGHQFPNYSSELNVNALLLGDSALYLCASSTGQGWDTGELFFGEGSRLTVL

SEQ ID NO: 4197 - protein, 128 aa, Artificial Sequence
  Description of Artificial Sequence: Synthetic polypeptide
MLLLLLLLGPGSGLGAVVSQHPSWVICKSGTSVKIECRSLDFQATTMFWYRQFPKQSLMLMATSNEGSKATYEQGVEKDKFLINHASLTLSTLTVTSAHPEDSSFYICSARGTSYEQYFGPGTRLTVT

SEQ ID NO: 4198 - protein, 142 aa, Artificial Sequence
  Description of Artificial Sequence: Synthetic polypeptide
MLSPDLPDSAWNTRLLCHVMLCLLGAGSVAAGVIQSPRHLIKEKRETATLKCYPIPRHDTVYWYQQGPGQDPQFLISFYEKMQSDKGSIPDRFSAQQFSDYHSELNMSSLELGDSALYFCASSDRGGTDTQYFGPGTRLTVL

SEQ ID NO: 4199 - protein, 132 aa, Artificial Sequence
  Description of Artificial Sequence: Synthetic polypeptide
MGTRLLCWAALCLLGADHTGAGVSQTPSNKVTEKGKYVELRCDPISGHTALYWYRQSLGQGPEFLIYFQGTGAADDSGLPNDRFFAVRPEGSVSTLKIQRTERGDSAVYLCASSFGFNSPLHFGNGTRLTVT

SEQ ID NO: 4200 - protein, 129 aa, Artificial Sequence
  Description of Artificial Sequence: Synthetic polypeptide
MGSRLLCWVLLCLLGAGPVKAGVTQTPRYLIKTRGQQVTLSCSPISGHRSVSWYQQTPGQGLQFLFEYFSETQRNKGNFPGRFSGRQFSNSRSEMNVSTLELGDSALYLCASRWGTEAFFGQGTRLTVV

SEQ ID NO: 4201 - protein, 129 aa, Artificial Sequence
  Description of Artificial Sequence: Synthetic polypeptide
MLSLLLLLLGLGSVFSAVISQKPSRDICQRGTSLTIQCQVDSQVTMMFWYRQQPGQSLTLIATANQGSEATYESGFVIDKFPISRPNLTFSTLTVSNMSPEDSSIYLCSGRLTENYGYTFGSGTRLTVV

SEQ ID NO: 4202 - protein, 132 aa, Artificial Sequence
  Description of Artificial Sequence: Synthetic polypeptide
MGIRLLCRVAFCFLAVGLVDVKVTQSSRYLVKRTGEKVFLECVQDMDHENMFWYRQDPGLGLRLIYFSYDVKMKEKGDIPEGYSVSREKKERFSLILESASTNQTSMYLCASSFRGRRAEAFFGQGTRLTVV

SEQ ID NO: 4203 - protein, 137 aa, Artificial Sequence
  Description of Artificial Sequence: Synthetic polypeptide
MGFRLLCCVAFCLLGAGPVDSGVTQTPKHLITATGQRVTLRCSPRSGDLSVYWYQQSLDQGLQFLIQYYNGEERAKGNILERFSAQQFPDLHSELNLSSLELGDSALYFCASSVDSKGQGPGANVLTFGAGSRLTVL

SEQ ID NO: 4204 - protein, 132 aa, Artificial Sequence
  Description of Artificial Sequence: Synthetic polypeptide
MGFRLLCCVAFCLLGAGPVDSGVTQTPKHLITATGQRVTLRCSPRSGDLSVYWYQQSLDQGLQFLIQYYNGEERAKGNILERFSAQQFPDLHSELNLSSLELGDSALYFCASSEGGTAYEQYFGPGTRLTVT

SEQ ID NO: 4205 - protein, 132 aa, Artificial Sequence
  Description of Artificial Sequence: Synthetic polypeptide
MSIGLLCCVAFSLLWASPVNAGVTQTPKFQVLKTGQSMTLQCAQDMNHNSMYWYRQDPGMGLRLIYYSASEGTTDKGEVPNGYNVSRLNKREFSLRLESAAPSQTSVYFCASSEFRAAYEQYFGPGTRLTVT

SEQ ID NO: 4206 - protein, 132 aa, Artificial Sequence
  Description of Artificial Sequence: Synthetic polypeptide
MGTRLLCWVAFCLLVEELIEAGVVQSPRYKIIEKKQPVAFWCNPISGHNTLYWYLQNLGQGPELLIRYENEEAVDDSQLPKDRFSAERLKGVDSTLKIQPAELGDSAVYLCASSVTGGTEAFFGQGTRLTVV

SEQ ID NO: 4207 - protein, 130 aa, Artificial Sequence
  Description of Artificial Sequence: Synthetic polypeptide
MGPGLLCWVLLCLLGAGSVETGVTQSPTHLIKTRGQQVTLRCSSQSGHNTVSWYQQALGQGPQFIFQYYREEENGRGNFPPRFSGLQFPNYSSELNVNALELDDSALYLCASSLDAYEQFFGPGTRLTVL

SEQ ID NO: 4208 - protein, 133 aa, Artificial Sequence
  Description of Artificial Sequence: Synthetic polypeptide
MGCRLLCCAVLCLLGAVPIDTEVTQTPKHLVMGMTNKKSLKCEQHMGHRAMYWYKQKAKKPPELMFVYSYEKLSINESVPSRFSPECPNSSLLNLHLHALQPEDSALYLCASSQVWGANTEAFFGQGTRLTVV

SEQ ID NO: 4209 - protein, 132 aa, Artificial Sequence
  Description of Artificial Sequence: Synthetic polypeptide
MGFRLLCCVAFCLLGAGPVDSGVTQTPKHLITATGQRVTLRCSPRSGDLSVYWYQQSLDQGLQFLIQYYNGEERAKGNILERFSAQQFPDLHSELNLSSLELGDSALYFCASSVAGETYEQYFGPGTRLTVT

SEQ ID NO: 4210 - protein, 132 aa, Artificial Sequence
  Description of Artificial Sequence: Synthetic polypeptide
MGTSLLCWMALCLLGADHADTGVSQDPRHKITKRGQNVTFRCDPISEHNRLYWYRQTLGQGPEFLTYFQNEAQLEKSRLLSDRFSAERPKGSFSTLEIQRTEQGDSAMYLCASSTDSYNEQFFGPGTRLTVL

SEQ ID NO: 4211 - protein, 132 aa, Artificial Sequence
  Description of Artificial Sequence: Synthetic polypeptide
MGFRLLCCVAFCLLGAGPVDSGVTQTPKHLITATGQRVTLRCSPRSGDLSVYWYQQSLDQGLQFLIQYYNGEERAKGNILERFSAQQFPDLHSELNLSSLELGDSALYFCASSVRDGGTEAFFGQGTRLTVV

SEQ ID NO: 4212 - protein, 133 aa, Artificial Sequence
  Description of Artificial Sequence: Synthetic polypeptide
MSIGLLCCVAFSLLWASPVNAGVTQTPKFQVLKTGQSMTLQCAQDMNHNSMYWYRQDPGMGLRLIYYSASEGTTDKGEVPNGYNVSRLNKREFSLRLESAAPSQTSVYFCASSEWVWTGRTQYFGPGTRLLVL

SEQ ID NO: 4213 - protein, 135 aa, Artificial Sequence
  Description of Artificial Sequence: Synthetic polypeptide
MGPGLLCWVLLCLLGAGPVDAGVTQSPTHLIKTRGQQVTLRCSPISGHKSVSWYQQVLGQGPQFIFQYYEKEERGRGNFPDRFSARQFPNYSSELNVNALLLGDSALYLCASSPLPGQAEVGGYTFGSGTRLTVV

SEQ ID NO: 4214 - protein, 133 aa, Artificial Sequence
  Description of Artificial Sequence: Synthetic polypeptide
MGCRLLCCAVLCLLGAVPMETGVTQTPRHLVMGMTNKKSLKCEQHLGHNAMYWYKQSAKKPLELMFVYNFKEQTENNSVPSRFSPECPNSSHLFLHLHTLQPEDSALYLCASSQGRQGGYEQYFGPGTRLTVT

SEQ ID NO: 4215 - protein, 135 aa, Artificial Sequence
  Description of Artificial Sequence: Synthetic polypeptide
MGFRLLCCVAFCLLGAGPVDSGVTQTPKHLITATGQRVTLRCSPRSGDLSVYWYQQSLDQGLQFLIQYYNGEERAKGNILERFSAQQFPDLHSELNLSSLELGDSALYFCASSVQPGQGALNEQYFGPGTRLTVT

SEQ ID NO: 4216 - protein, 133 aa, Artificial Sequence
  Description of Artificial Sequence: Synthetic polypeptide
MGPGLLCWVLLCLLGAGSVETGVTQSPTHLIKTRGQQVTLRCSSQSGHNTVSWYQQALGQGPQFIFQYYREEENGRGNFPPRFSGLQFPNYSSELNVNALELDDSALYLCASSRQDGNFYEQYFGPGTRLTVT

SEQ ID NO: 4217 - protein, 132 aa, Artificial Sequence
  Description of Artificial Sequence: Synthetic polypeptide
MGTRLLCWVVLGFLGTDHTGAGVSQSPRYKVAKRGQDVALRCDPISGHVSLFWYQQALGQGPEFLTYFQNEAQLDKSGLPSDRFFAERPEGSVSTLKIQRTQQEDSAVYLCASSLGGGWGYTFGSGTRLTVV

SEQ ID NO: 4218 - protein, 134 aa, Artificial Sequence
  Description of Artificial Sequence: Synthetic polypeptide
MDTWLVCWAIFSLLKAGLTEPEVTQTPSHQVTQMGQEVILRCVPISNHLYFYWYRQILGQKVEFLVSFYNNEISEKSEIFDDQFSVERPDGSNFTLKIRSTKLEDSAMYFCASSPSGFRGQPQHFGDGTRLSIL

SEQ ID NO: 4219 - protein, 133 aa, Artificial Sequence
  Description of Artificial Sequence: Synthetic polypeptide
MGFRLLCCVAFCLLGAGPVDSGVTQTPKHLITATGQRVTLRCSPRSGDLSVYWYQQSLDQGLQFLIQYYNGEERAKGNILERFSAQQFPDLHSELNLSSLELGDSALYFCASSPEGSSYNEQFFGPGTRLTVL

SEQ ID NO: 4220 - protein, 130 aa, Artificial Sequence
  Description of Artificial Sequence: Synthetic polypeptide
MGPGLLCWVLLCLLGAGSVETGVTQSPTHLIKTRGQQVTLRCSSQSGHNTVSWYQQALGQGPQFIFQYYREEENGRGNFPPRFSGLQFPNYSSELNVNALELDDSALYLCASRSDSYEQYFGPGTRLTVT

SEQ ID NO: 4221 - protein, 133 aa, Artificial Sequence
  Description of Artificial Sequence: Synthetic polypeptide
MGPQLLGYVVLCLLGAGPLEAQVTQNPRYLITVTGKKLTVTCSQNMNHEYMSWYRQDPGLGLRQIYYSMNVEVTDKGDVPEGYKVSRKEKRNFPLILESPSPNQTSLYFCASSLIQGNTGELFFGEGSRLTVL

SEQ ID NO: 4222 - protein, 131 aa, Artificial Sequence
  Description of Artificial Sequence: Synthetic polypeptide
MASLLFFCGAFYLLGTGSMDADVTQTPRNRITKTGKRIMLECSQTKGHDRMYWYRQDPGLGLQLIYYSFDVKDINKGEISDGYSVSRQAQAKFSLSLESAIPNQTALYFCATMERDTGELFFGEGSRLTVL

SEQ ID NO: 4223 - protein, 131 aa, Artificial Sequence
  Description of Artificial Sequence: Synthetic polypeptide
MGPQLLGYVVLCLLGAGPLEAQVTQNPRYLITVTGKKLTVTCSQNMNHEYMSWYRQDPGLGLRQIYYSMNVEVTDKGDVPEGYKVSRKEKRNFPLILESPSPNQTSLYFCASSLSGYNEQFFGPGTRLTVL

SEQ ID NO: 4224 - protein, 131 aa, Artificial Sequence
  Description of Artificial Sequence: Synthetic polypeptide
MGFRLLCCVAFCLLGAGPVDSGVTQTPKHLITATGQRVTLRCSPRSGDLSVYWYQQSLDQGLQFLIQYYNGEERAKGNILERFSAQQFPDLHSELNLSSLELGDSALYFCASSVGEGYEQYFGPGTRLTVT

SEQ ID NO: 4225 - protein, 131 aa, Artificial Sequence
  Description of Artificial Sequence: Synthetic polypeptide
MGPGLLCWALLCLLGAGSVETGVTQSPTHLIKTRGQQVTLRCSSQSGHNTVSWYQQALGQGPQFIFQYYREEENGRGNFPPRFSGLQFPNYSSELNVNALELDDSALYLCASSEDAYYGYTFGSGTRLTVV

SEQ ID NO: 4226 - protein, 133 aa, Artificial Sequence
  Description of Artificial Sequence: Synthetic polypeptide
MGSRLLCWVLLCLLGAGPVKAGVTQTPRYLIKTRGQQVTLSCSPISGHRSVSWYQQTPGQGLQFLFEYFSETQRNKGNFPGRFSGRQFSNSRSEMNVSTLELGDSALYLCASSLGRGDTDTQYFGPGTRLTVL

SEQ ID NO: 4227 - protein, 133 aa, Artificial Sequence
  Description of Artificial Sequence: Synthetic polypeptide
MSIGLLCCAALSLLWAGPVNAGVTQTPKFQVLKTGQSMTLQCAQDMNHEYMSWYRQDPGMGLRLIHYSVGAGITDQGEVPNGYNVSRSTTEDFPLRLLSAAPSQTSVYFCASRPGTNIPYEQYFGPGTRLTVT

SEQ ID NO: 4228 - protein, 130 aa, Artificial Sequence
  Description of Artificial Sequence: Synthetic polypeptide
MGFRLLCCVAFCLLGAGPVDSGVTQTPKHLITATGQRVTLRCSPRSGDLSVYWYQQSLDQGLQFLIQYYNGEERAKGNILERFSAQQFPDLHSELNLSSLELGDSALYFCASSENTGELFFGEGSRLTVL

SEQ ID NO: 4229 - protein, 127 aa, Artificial Sequence
  Description of Artificial Sequence: Synthetic polypeptide
MLLLLLLLGPGSGLGAVVSQHPSWVICKSGTSVKIECRSLDFQATTMFWYRQFPKQSLMLMATSNEGSKATYEQGVEKDKFLINHASLTLSTLTVTSAHPEDSSFYICSASLSYEQYFGPGTRLTVT

SEQ ID NO: 4230 - protein, 131 aa, Artificial Sequence
  Description of Artificial Sequence: Synthetic polypeptide
MSIGLLCCVAFSLLWASPVNAGVTQTPKFQVLKTGQSMTLQCAQDMNHNSMYWYRQDPGMGLRLIYYSASEGTTDKGEVPNGYNVSRLNKREFSLRLESAAPSQTSVYFCASSDGLWDPRRFGPGTRLTVT

SEQ ID NO: 4231 - protein, 132 aa, Artificial Sequence
  Description of Artificial Sequence: Synthetic polypeptide
MDTWLVCWAIFSLLKAGLTEPEVTQTPSHQVTQMGQEVILRCVPISNHLYFYWYRQILGQKVEFLVSFYNNEISEKSEIFDDQFSVERPDGSNFTLKIRSTKLEDSAMYFCASSVWVTYEQYFGPGTRLTVT

SEQ ID NO: 4232 - protein, 132 aa, Artificial Sequence
  Description of Artificial Sequence: Synthetic polypeptide
MGSWTLCCVSLCILVAKHTDAGVIQSPRHEVTEMGQEVTLRCKPISGHDYLFWYRQTMMRGLELLIYFNNNVPIDDSGMPEDRFSAKMPNASFSTLKIQPSEPRDSAVYFCASGFQGISPLHFGNGTRLTVT

SEQ ID NO: 4233 - protein, 130 aa, Artificial Sequence
  Description of Artificial Sequence: Synthetic polypeptide
MGTSLLCWMALCLLGADHADTGVSQNPRHKITKRGQNVTFRCDPISEHNRLYWYRQTLGQGPEFLTYFQNEAQLEKSRLLSDRFSAERPKGSFSTLEIQRTEQGDSAMYLCASSSTYEQYFGPGTRLTVT

SEQ ID NO: 4234 - protein, 132 aa, Artificial Sequence
  Description of Artificial Sequence: Synthetic polypeptide
MGTSLLCWMALCLLGADHADTGVSQNPRHKITKRGQNVTFRCDPISEHNRLYWYRQTLGQGPEFLTYFQNEAQLEKSRLLSDRFSAERPKGSFSTLEIQRTEQGDSAMYLCASSLDSLYGYTFGSGTRLTVV

SEQ ID NO: 4235 - protein, 134 aa, Artificial Sequence
  Description of Artificial Sequence: Synthetic polypeptide
MGCRLLCCVVFCLLQAGPLDTAVSQTPKYLVTQMGNDKSIKCEQNLGHDTMYWYKQDSKKFLKIMFSYNNKELIINETVPNRFSPKSPDKAHLNLHINSLELGDSAVYFCASSQERAATNEKLFFGSGTQLSVL

SEQ ID NO: 4236 - protein, 130 aa, Artificial Sequence
  Description of Artificial Sequence: Synthetic polypeptide
MGSRLLCWVLLCLLGAGPVKAGVTQTPRYLIKTRGQQVTLSCSPISGHRSVSWYQQTPGQGLQFLFEYFSETQRNKGNFPGRFSGRQFSNSRSEMNVSTLELGDSALYLCASSLIGGELFFGEGSRLTVL

SEQ ID NO: 4237 - protein, 138 aa, Artificial Sequence
  Description of Artificial Sequence: Synthetic polypeptide
MGTSLLCWMALCLLGADHADTGVSQDPRHKITKRGQNVTFRCDPISEHNRLYWYRQTLGQGPEFLTYFQNEAQLEKSRLLSDRFSAERPKGSFSTLEIQRTEQGDSAMYLCASSPGVSVAGAYQETQYFGPGTRLLVL

SEQ ID NO: 4238 - protein, 131 aa, Artificial Sequence
  Description of Artificial Sequence: Synthetic polypeptide
MGPQLLGYVVLCLLGAGPLEAQVTQNPRYLITVTGKKLTVTCSQNMNHEYMSWYRQDPGLGLRQIYYSMNVEVTDKGDVPEGYKVSRKEKRNFPLILESPSPNQTSLYFCASSTQGGNEQFFGPGTRLTVL

SEQ ID NO: 4239 - protein, 136 aa, Artificial Sequence
  Description of Artificial Sequence: Synthetic polypeptide
MGPQLLGYVVLCLLGAGPLEAQVTQNPRYLITVTGKKLTVTCSQNMNHEYMSWYRQDPGLGLRQIYYSMNVEVTDKGDVPEGYKVSRKEKRNFPLILESPSPNQTSLYFCASSSPAGTGMFNSPLHFGNGTRLTVT

SEQ ID NO: 4240 - protein, 132 aa, Artificial Sequence
  Description of Artificial Sequence: Synthetic polypeptide
MGIRLLCRVAFCFLAVGLVDVKVTQSSRYLVKRTGEKVFLECVQDMDHENMFWYRQDPGLGLRLIYFSYDVKMKEKGDIPEGYSVSREKKERFSLILESASTNQTSMYLCASRLRDRDHEQYFGPGTRLTVT

SEQ ID NO: 4241 - protein, 133 aa, Artificial Sequence
  Description of Artificial Sequence: Synthetic polypeptide
MGIRLLCRVAFCFLAVGLVDVKVTQSSRYLVKRTGEKVFLECVQDMDHENMFWYRQDPGLGLRLIYFSYDVKMKEKGDIPEGYSVSREKKERFSLILESASTNQTSMYLCASSLTLYSNQPQHFGDGTRLSIL

SEQ ID NO: 4242 - protein, 133 aa, Artificial Sequence
  Description of Artificial Sequence: Synthetic polypeptide
MGPGLLCWALLCLLGAGLVDAGVTQSPTHLIKTRGQQVTLRCSPKSGHDTVSWYQQALGQGPQFIFQYYEEEERQRGNFPDRFSGHQFPNYSSELNVNALLLGDSALYLCASSPGLAGYNEQFFGPGTRLTVL

SEQ ID NO: 4243 - protein, 131 aa, Artificial Sequence
  Description of Artificial Sequence: Synthetic polypeptide
MGIRLLCRVAFCFLAVGLVDVKVTQSSRYLVKRTGEKVFLECVQDMDHENMFWYRQDPGLGLRLIYFSYDVKMKEKGDIPEGYSVSREKKERFSLILESASTNQTSMYLCASSPTGGYEQYFGPGTRLTVT

SEQ ID NO: 4244 - protein, 132 aa, Artificial Sequence
  Description of Artificial Sequence: Synthetic polypeptide
MLLLLLLLGPGSGLGAVVSQHPSRVICKSGTSVKIECRSLDFQATTMFWYRQFPKQSLMLMATSNEGSKATYEQGVEKDKFLINHASLTLSTLTVTSAHPEDSSFYICSARDRAAGGKTEAFFGQGTRLTVV

SEQ ID NO: 4245 - protein, 132 aa, Artificial Sequence
  Description of Artificial Sequence: Synthetic polypeptide
MGIRLLCRVAFCFLAVGLVDVKVTQSSRYLVKRTGEKVFLECVQDMDHENMFWYRQDPGLGLRLIYFSYDVKMKEKGDIPEGYSVSREKKERFSLILESASTNQTSMYLCASSSGTLRETQYFGPGTRLLVL

SEQ ID NO: 4246 - protein, 132 aa, Artificial Sequence
  Description of Artificial Sequence: Synthetic polypeptide
MDTWLVCWAIFSLLKAGLTEPEVTQTPSHQVTQMGQEVILRCVPISNHLYFYWYRQILGQKVEFLVSFYNNEISEKSEIFDDQFSVERPDGSNFTLKIRSTKLEDSAMYFCASSEGGNSPLHFGNGTRLTVT

SEQ ID NO: 4247 - protein, 126 aa, Artificial Sequence
  Description of Artificial Sequence: Synthetic polypeptide
MLSLLLLLLGLGSVFSAVISQKPSRDICQRGTSLTIQCQVDSQVTMMFWYRQQPGQSLTLIATANQGSEATYESGFVIDKFPISRPNLTFSTLTVSNMSPEDSSIYLCSVFTGEAFFGQGTRLTVV

SEQ ID NO: 4248 - protein, 136 aa, Artificial Sequence
  Description of Artificial Sequence: Synthetic polypeptide
MSIGLLCCVAFSLLWASPVNAGVTQTPKFQVLKTGQSMTLQCAQDMNHNSMYWYRQDPGMGLRLIYYSASEGTTDKGEVPNGYNVSRLNKREFSLRLESAAPSQTSVYFCASSEAGTFSYSNQPQHFGDGTRLSIL

SEQ ID NO: 4249 - protein, 131 aa, Artificial Sequence
  Description of Artificial Sequence: Synthetic polypeptide
MGPQLLGYVVLCLLGAGPLEAQVTQNPRYLITVTGKKLTVTCSQNMNHEYMSWYRQDPGLGLRQIYYSMNVEVTDKGDVPEGYKVSRKEKRNFPLILESPSPNQTSLYFCASSLRDGYEQYFGPGTRLTVT

SEQ ID NO: 4250 - protein, 132 aa, Artificial Sequence
  Description of Artificial Sequence: Synthetic polypeptide
MLCSLLALLLGTFFGVRSQTIHQWPATLVQPVGSPLSLECTVEGTSNPNLYWYRQAAGRGLQLLFYSVGIGQISSEVPQNLSASRPQDRQFILSSKKLLLSDSGFYLCAWGAKRGGIYNEQFFGPGTRLTVL

SEQ ID NO: 4251 - protein, 134 aa, Artificial Sequence
  Description of Artificial Sequence: Synthetic polypeptide
MDTWLVCWAIFSLLKAGLTEPEVTQTPSHQVTQMGQEVILRCVPISNHLYFYWYRQILGQKVEFLVSFYNNEISEKSEIFDDQFSVERPDGSNFTLKIRSTKLEDSAMYFCASQEGGGPYNEQFFGPGTRLTVL

SEQ ID NO: 4252 - protein, 133 aa, Artificial Sequence
  Description of Artificial Sequence: Synthetic polypeptide
MGSRLLCWVLLCLLGAGPVKAGVTQTPRYLIKTRGQQVTLSCSPISGHRSVSWYQQTPGQGLQFLFEYFSETQRNKGNFPGRFSGRQFSNSRSEMNVSTLELGDSALYLCASSLFDGHNTEAFFGQGTRLTVV

SEQ ID NO: 4253 - protein, 135 aa, Artificial Sequence
  Description of Artificial Sequence: Synthetic polypeptide
MGPQLLGYVVLCLLGAGPLEAQVTQNPRYLITVTGKKLTVTCSQNMNHEYMSWYRQDPGLGLRQIYYSMNVEVTDKGDVPEGYKVSRKEKRNFPLILESPSPNQTSLYFCASSAQQGELRNSPLHFGNGTRLTVT

SEQ ID NO: 4254 - protein, 134 aa, Artificial Sequence
  Description of Artificial Sequence: Synthetic polypeptide
MGFRLLCCVAFCLLGAGPVDSGVTQTPKHLITATGQRVTLRCSPRSGDLSVYWYQQSLDQGLQFLIQYYNGEERAKGNILERFSAQQFPDLHSELNLSSLELGDSALYFCASSVVVGGLYNEQFFGPGTRLTVL

SEQ ID NO: 4255 - protein, 133 aa, Artificial Sequence
  Description of Artificial Sequence: Synthetic polypeptide
MGPQLLGYVVLCLLGAGPLEAQVTQNPRYLITVTGKKLTVTCSQNMNHEYMSWYRQDPGLGLRQIYYSMNVEVTDKGDVPEGYKVSRKEKRNFPLILESPSPNQTSLYFCASSPYDMPHQPQHFGDGTRLSIL

SEQ ID NO: 4256 - protein, 132 aa, Artificial Sequence
  Description of Artificial Sequence: Synthetic polypeptide
MGCRLLCCAVLCLLGAVPIDTEVTQTPKHLVMGMTNKKSLKCEQHMGHRAMYWYKQKAKKPPELMFVYSYEKLSINESVPSRFSPECPNSSLLNLHLHALQPEDSALYLCASSQPDSGNTIYFGEGSWLTVV

SEQ ID NO: 4257 - protein, 137 aa, Artificial Sequence
  Description of Artificial Sequence: Synthetic polypeptide
MGTSLLCWMALCLLGADHADTGVSQNPRHKITKRGQNVTFRCDPISEHNRLYWYRQTLGQGPEFLTYFQNEAQLEKSRLLSDRFSAERPKGSFSTLEIQRTEQGDSAMYLCASSLEVKGGNSYNEQFFGPGTRLTVL

SEQ ID NO: 4258 - protein, 134 aa, Artificial Sequence
  Description of Artificial Sequence: Synthetic polypeptide
MGTRLLCWVAFCLLVEELIEAGVVQSPRYKIIEKKQPVAFWCNPISGHNTLYWYLQNLGQGPELLIRYENEEAVDDSQLPKDRFSAERLKGVDSTLKIQPAELGDSAVYLCASSRGTAGTDTQYFGPGTRLTVL

SEQ ID NO: 4259 - protein, 135 aa, Artificial Sequence
  Description of Artificial Sequence: Synthetic polypeptide
MGSWTLCCVSLCILVAKHTDAGVIQSPRHEVTEMGQEVTLRCKPISGHDYLFWYRQTMMRGLELLIYFNNNVPIDDSGMPEDRFSAKMPNASFSTLKIQPSEPRDSAVYFCASSYYTGSLGGELFFGEGSRLTVL

SEQ ID NO: 4260 - protein, 133 aa, Artificial Sequence
  Description of Artificial Sequence: Synthetic polypeptide
MSNQVLCCVVLCFLGANTVDGGITQSPKYLFRKEGQNVTLSCEQNLNHDAMYWYRQDPGQGLRLIYYSQIVNDFQKGDIAEGYSVSREKKESFPLTVTSAQKNPTAFYLCASSWGGGLNTEAFFGQGTRLTVV

SEQ ID NO: 4261 - protein, 133 aa, Artificial Sequence
  Description of Artificial Sequence: Synthetic polypeptide
MGFRLLCCVAFCLLGAGPVDSGVTQTPKHLITATGQRVTLRCSPRSGDLSVYWYQQSLDQGLQFLIQYYNGEERAKGNILERFSAQQFPDLHSELNLSSLELGDSALYFCASSVEGGLNTEAFFGQGTRLTVV

SEQ ID NO: 4262 - protein, 137 aa, Artificial Sequence
  Description of Artificial Sequence: Synthetic polypeptide
MGTSLLCWVVLGFLGTDSVSTDHTGAGVSQSPRYKVTKRGQDVTLRCDPISSHATLYWYQQALGQGPEFLTYFNYEAQPDKSGLPSDRFSAERPEGSISTLTIQRTEQRDSAMYRCASSGGAINEQFFGPGTRLTVL

SEQ ID NO: 4263 - protein, 140 aa, Artificial Sequence
  Description of Artificial Sequence: Synthetic polypeptide
MRSWPGPEMGTRLFFYVALCLLWTGHVDAGITQSPRHKVTETGTPVTLRCHQTENHRYMYWYRQDPGHGLRLIHYSYGVKDTDKGEVSDGYSVSRSKTEDFLLTLESATSSQTSVYFCAISEGGGPDTQYFGPGTRLTVL

SEQ ID NO: 4264 - protein, 133 aa, Artificial Sequence
  Description of Artificial Sequence: Synthetic polypeptide
MSIGLLCCVAFSLLWASPVNAGVTQTPKFQVLKTGQSMTLQCAQDMNHEYMSWYRQDPGMGLRLIHYSVGAGITDQGEVPNGYNVSRSTTEDFPLRLLSAAPSQTSVYFCASRPGTNIPYEQYFGPGTRLTVT

SEQ ID NO: 4265 - protein, 132 aa, Artificial Sequence
  Description of Artificial Sequence: Synthetic polypeptide
MTIRLLCYVGFYFLGAGLMEADIYQTPRYLVIGTGKKITLECSQTMGHDKMYWYQQDPGMELHLIHYSYGVNSTEKGDLSSESTVSRIRTEHFPLTLESARPSHTSQYLCATALGQGDGGYTFGSGTRLTVV

SEQ ID NO: 4266 - protein, 133 aa, Artificial Sequence
  Description of Artificial Sequence: Synthetic polypeptide
MGTSLLCWMALCLLGADHADTGVSQNPRHKITKRGQNVTFRCDPISEHNRLYWYRQTLGQGPEFLTYFQNEAQLEKSRLLSDRFSAERPKGSFSTLEIQRTEQGDSAMYLCASSARTGTGELFFGEGSRLTVL

SEQ ID NO: 4267 - protein, 133 aa, Artificial Sequence
  Description of Artificial Sequence: Synthetic polypeptide
MLLLLLLLGPGSGLGAVVSQHPSWVICKSGTSVKIECRSLDFQATTMFWYRQFPKQSLMLMATSNEGSKATYEQGVEKDKFLINHASLTLSTLTVTSAHPEDSSFYICSARDLLAGGPYNEQFFGPGTRLTVL

SEQ ID NO: 4268 - protein, 132 aa, Artificial Sequence
  Description of Artificial Sequence: Synthetic polypeptide
MGTRLLCWVAFCLLVEELIEAGVVQSPRYKIIEKKQPVAFWCNPISGHNTLYWYRQNLGQGPELLIRYENEEAVDDSQLPKDRFSAERLKGVDSTLKIQPAELGDSAVYLCASSLGTGGVHTFGSGTRLTVV

SEQ ID NO: 4269 - protein, 135 aa, Artificial Sequence
  Description of Artificial Sequence: Synthetic polypeptide
MSIGLLCCAALSLLWAGPVNAGVTQTPKFQVLKTGQSMTLQCAQDMNHEYMSWYRQDPGMGLRLIHYSVGAGITDQGEVPNGYNVSRSTTEDFPLRLLSAAPSQTSVYFCASRRRTSGGLSYEQYFGPGTRLTVT

SEQ ID NO: 4270 - protein, 9 aa, Artificial Sequence
  Description of Artificial Sequence: Synthetic peptide
LLASSILCA

SEQ ID NO: 4271 - protein, 10 aa, Artificial Sequence
  Description of Artificial Sequence: Synthetic peptide
GVYDGEEHSV

SEQ ID NO: 4272 - protein, 10 aa, Artificial Sequence
  Description of Artificial Sequence: Synthetic peptide
GEMSSNSTAL

SEQ ID NO: 4273 - protein, 10 aa, Artificial Sequence
  Description of Artificial Sequence: Synthetic peptide
CAFSNARLMF

SEQ ID NO: 4274 - protein, 15 aa, Artificial Sequence
  Description of Artificial Sequence: Synthetic peptide
CAVRDAMGGSYIPTF

SEQ ID NO: 4275 - protein, 12 aa, Artificial Sequence
  Description of Artificial Sequence: Synthetic peptide
CAVDNYGQNFVF

SEQ ID NO: 4276 - protein, 13 aa, Artificial Sequence
  Description of Artificial Sequence: Synthetic peptide
CAVYNQAGTALIF

SEQ ID NO: 4277 - protein, 14 aa, Artificial Sequence
  Description of Artificial Sequence: Synthetic peptide
CALLSSGGYNKLIF

SEQ ID NO: 4278 - protein, 12 aa, Artificial Sequence
  Description of Artificial Sequence: Synthetic peptide
CAGPGGYQKVTF

SEQ ID NO: 4279 - protein, 14 aa, Artificial Sequence
  Description of Artificial Sequence: Synthetic peptide
CAVRDDNAGNMLTF

SEQ ID NO: 4280 - protein, 12 aa, Artificial Sequence
  Description of Artificial Sequence: Synthetic peptide
CAYRDNFNKFYF

SEQ ID NO: 4281 - protein, 17 aa, Artificial Sequence
  Description of Artificial Sequence: Synthetic peptide
CLVGDIPSVDGGFKTIF

SEQ ID NO: 4282 - protein, 15 aa, Artificial Sequence
  Description of Artificial Sequence: Synthetic peptide
CAASSLREGYSTLTF

SEQ ID NO: 4283 - protein, 15 aa, Artificial Sequence
  Description of Artificial Sequence: Synthetic peptide
CAMRGDPQGAQKLVF

SEQ ID NO: 4284 - protein, 16 aa, Artificial Sequence
  Description of Artificial Sequence: Synthetic peptide
CALSEAWGNAGNMLTF

SEQ ID NO: 4285 - protein, 13 aa, Artificial Sequence
  Description of Artificial Sequence: Synthetic peptide
CAVVPDNTDKLIF

SEQ ID NO: 4286 - protein, 14 aa, Artificial Sequence
  Description of Artificial Sequence: Synthetic peptide
CAFIVHQAGTALIF

SEQ ID NO: 4287 - protein, 17 aa, Artificial Sequence
  Description of Artificial Sequence: Synthetic peptide
CASSQEAGTGSYNEQFF

SEQ ID NO: 4288 - protein, 12 aa, Artificial Sequence
  Description of Artificial Sequence: Synthetic peptide
CASSTGISEQFF

SEQ ID NO: 4289 - protein, 13 aa, Artificial Sequence
  Description of Artificial Sequence: Synthetic peptide
CASSTTGSSPLHF

SEQ ID NO: 4290 - protein, 13 aa, Artificial Sequence
  Description of Artificial Sequence: Synthetic peptide
CASSLYSTDTQYF

SEQ ID NO: 4291 - protein, 18 aa, Artificial Sequence
  Description of Artificial Sequence: Synthetic peptide
CASSYLSPAAGFSYEQYF

SEQ ID NO: 4292 - protein, 13 aa, Artificial Sequence
  Description of Artificial Sequence: Synthetic peptide
CASSLATVYEQYF

SEQ ID NO: 4293 - protein, 13 aa, Artificial Sequence
  Description of Artificial Sequence: Synthetic peptide
CASSLANTGELFF

SEQ ID NO: 4294 - protein, 15 aa, Artificial Sequence
  Description of Artificial Sequence: Synthetic peptide
CASSGTGGAYNEQFF

SEQ ID NO: 4295 - protein, 15 aa, Artificial Sequence
  Description of Artificial Sequence: Synthetic peptide
CASSTSLELDQPQHF

SEQ ID NO: 4296 - protein, 13 aa, Artificial Sequence
  Description of Artificial Sequence: Synthetic peptide
CASSSTDLNEQFF

SEQ ID NO: 4297 - protein, 14 aa, Artificial Sequence
  Description of Artificial Sequence: Synthetic peptide
CASSQGRGKNIQYF

SEQ ID NO: 4298 - protein, 14 aa, Artificial Sequence
  Description of Artificial Sequence: Synthetic peptide
CASSPGQQNTEAFF

SEQ ID NO: 4299 - protein, 15 aa, Artificial Sequence
  Description of Artificial Sequence: Synthetic peptide
CASSWGGSNTGELFF

SEQ ID NO: 4300 - protein, 14 aa, Artificial Sequence
  Description of Artificial Sequence: Synthetic peptide
CASSLGLLYNEQFF

SEQ ID NO: 4301 - protein, 11 aa, Artificial Sequence
  Description of Artificial Sequence: Synthetic peptide
CASQSGDTQYF

SEQ ID NO: 4302 - protein, 141 aa, Artificial Sequence
  Description of Artificial Sequence: Synthetic polypeptide
MEKNPLAAPLLILWFHLDCVSSILNVEQSPQSLHVQEGDSTNFTCSFPSSNFYALHWYRWETAKSPEALFVMTLNGDEKKKGRISATLNTKEGYSYLYIKGSQPEDSATYLCAFSNARLMFGDGTQLVVKPNIQNPDPAVY

SEQ ID NO: 4303 - protein, 144 aa, Artificial Sequence
  Description of Artificial Sequence: Synthetic polypeptide
MASAPISMLAMLFTLSGLRAQSVAQPEDQVNVAEGNPLTVKCTYSVSGNPYLFWYVQYPNRGLQFLLKYITGDNLVKGSYGFEAEFNKSQTSFHLKKPSALVSDSALYFCAVRDAMGGSYIPTFGRGTSLIVHPYIQNPDPAVY

SEQ ID NO: 4304 - protein, 140 aa, Artificial Sequence
  Description of Artificial Sequence: Synthetic polypeptide
METLLGLLILWLQLQWVSSKQEVTQIPAALSVPEGENLVLNCSFTDSAIYNLQWFRQDPGKGLTSLLLIQSSQREQTSGRLNASLDKSSGRSTLYIAASQPGDSATYLCAVDNYGQNFVFGPGTRLSVLPYIQNPDPAVY

SEQ ID NO: 4305 - protein, 141 aa, Artificial Sequence
  Description of Artificial Sequence: Synthetic polypeptide
MEKMLECAFIVLWLQLGWLSGEDQVTQSPEALRLQEGESSSLNCSYTVSGLRGLFWYRQDPGKGPEFLFTLYSAGEEKEKERLKATLTKKESFLHITAPKPEDSATYLCAVYNQAGTALIFGKGTTLSVSSNIQNPDPAVY

SEQ ID NO: 4306 - protein, 145 aa, Artificial Sequence
  Description of Artificial Sequence: Synthetic polypeptide
MLTASLLRAVIASICVVSSMAQKVTQAQTEISVVEKEDVTLDCVYETRDTTYYLFWYKQPPSGELVFLIRRNSFDEQNEISGRYSWNFQKSTSSFNFTITASQVVDSAVYFCALLSSGGYNKLIFGAGTRLAVHPYIQNPDPAVY

SEQ ID NO: 4307 - protein, 141 aa, Artificial Sequence
  Description of Artificial Sequence: Synthetic polypeptide
MKTFAGFSFLFLWLQLDCMSRGEDVEQSLFLSVREGDSSVINCTYTDSSSTYLYWYKQEPGAGLQLLTYIFSNMDMKQDQRLTVLLNKKDKHLSLRIADTQTGDSAIYFCAGPGGYQKVTFGIGTKLQVIPNIQNPDPAVY

SEQ ID NO: 4308 - protein, 143 aa, Artificial Sequence
  Description of Artificial Sequence: Synthetic polypeptide
MASAPISMLAMLFTLSGLRAQSVAQPEDQVNVAEGNPLTVKCTYSVSGNPYLFWYVQYPNRGLQFLLKYITGDNLVKGSYGFEAEFNKSQTSFHLKKPSALVSDSALYFCAVRDDNAGNMLTFGGGTRLMVKPHIQNPDPAVY

SEQ ID NO: 4309 - protein, 143 aa, Artificial Sequence
  Description of Artificial Sequence: Synthetic polypeptide
MACPGFLWALVISTCLEFSMAQTVTQSQPEMSVQEAETVTLSCTYDTSESDYYLFWYKQPPSRQMILVIRQEAYKQQNATENRFSVNFQKAAKSFSLKISDSQLGDAAMYFCAYRDNFNKFYFGSGTKLNVKPNIQNPDPAVY

SEQ ID NO: 4310 - protein, 141 aa, Artificial Sequence
  Description of Artificial Sequence: Synthetic polypeptide
MRQVARVIMFLTLSTLSLAKTTQPISMDSYEGQEVNITCSHNNIATNDYITWYQQFPSQGPRFIIQGYKTKVTNEVASLFIPADRKSSTLSLPRVSLSDTAVYYCLVGDIPSVDGGFKTIFGAGTRLFVKANIQNPDPAVY

SEQ ID NO: 4311 - protein, 143 aa, Artificial Sequence
  Description of Artificial Sequence: Synthetic polypeptide
MTSIRAVFIFLWLQLDLVNGENVEQHPSTLSVQEGDSAVIKCTYSDSASNYFPWYKQELGKRPQLIIDIRSNVGEKKDQRIAVTLNKTAKHFSLHITETQPEDSAVYFCAASSLREGYSTLTFGKGTMLLVSPDIQNPDPAVY

SEQ ID NO: 4312 - protein, 146 aa, Artificial Sequence
  Description of Artificial Sequence: Synthetic polypeptide
MSLSSLLKVVTASLWLGPGIAQKITQTQPGMFVQEKEAVTLDCTYDTSDQSYGLFWYKQPSSGEMIFLIYQGSYDEQNATEGRYSLNFQKARKSANLVISASQLGDSAMYFCAMRGDPQGAQKLVFGQGTRLTINPNIQNPDPAVY

SEQ ID NO: 4313 - protein, 147 aa, Artificial Sequence
  Description of Artificial Sequence: Synthetic polypeptide
MLTASLLRAVIASICVVSSMAQKVTQAQTEISVVEKEDVTLDCVYETRDTTYYLFWYKQPPSGELVFLIRRNSFDEQNEISGRYSWNFQKSTSSFNFTITASQVVDSAVYFCALSEAWGNAGNMLTFGGGTRLMVKPHIQNPDPAVY

SEQ ID NO: 4314 - protein, 142 aa, Artificial Sequence
  Description of Artificial Sequence: Synthetic polypeptide
MMKCPQALLAIFWLLLSWVSSEDKVVQSPLSLVVHEGDTVTLNCSYEVTNFRSLLWYKQEKKAPTFLFMLTSSGIEKKSGRLSSILDKKELFSILNITATQTGDSAVYLCAVVPDNTDKLIFGTGTRLQVFPNIQNPDPAVY

SEQ ID NO: 4315 - protein, 145 aa, Artificial Sequence
  Description of Artificial Sequence: Synthetic polypeptide
MEKNPLAAPLLILWFHLDCVSSILNVEQSPQSLHVQEGDSTNFTCSFPSSNFYALHWYRWETAKSPEALFVMTLNGDEKKKGRISATLNTKEGYSYLYIKGSQPEDSATYLCAFIVHQAGTALIFGKGTTLSVSSNIQNPDPAVY

SEQ ID NO: 4316 - protein, 141 aa, Artificial Sequence
  Description of Artificial Sequence: Synthetic polypeptide
MLLLLVPVLEVIFTLGGTRAQSVTQLGSHVSVSEGALVLLRCNYSSSVPPYLFWYVQYPNQGLQLLLKYTSAATLVKGINGFEAEFKKSETSFHLTKPSAHMSDAAEYFCAVSDSSYKLIFGSGTRLLVRPDIQNPDPAVY

SEQ ID NO: 4317 - protein, 141 aa, Artificial Sequence
  Description of Artificial Sequence: Synthetic polypeptide
MGCRLLCCVVFCLLQAGPLDTAVSQTPKYLVTQMGNDKSIKCEQNLGHDTMYWYKQDSKKFLKIMFSYNNKELIINETVPNRFSPKSPDKAHLNLHINSLELGDSAVYFCASSQEAGTGSYNEQFFGPGTRLTVLEDLKNV

SEQ ID NO: 4318 - protein, 136 aa, Artificial Sequence
  Description of Artificial Sequence: Synthetic polypeptide
MSNQVLCCVVLCFLGANTVDGGITQSPKYLFRKEGQNVTLSCEQNLNHDAMYWYRQDPGQGLRLIYYSQIVNDFQKGDIAEGYSVSREKKESFPLTVTSAQKNPTAFYLCASSTGISEQFFGPGTRLTVLEDLKNV

SEQ ID NO: 4319 - protein, 137 aa, Artificial Sequence
  Description of Artificial Sequence: Synthetic polypeptide
MGPQLLGYVVLCLLGAGPLEAQVTQNPRYLITVTGKKLTVTCSQNMNHEYMSWYRQDPGLGLRQIYYSMNVEVTDKGDVPEGYKVSRKEKRNFPLILESPSPNQTSLYFCASSTTGSSPLHFGNGTRLTVTEDLNKV

SEQ ID NO: 4320 - protein, 137 aa, Artificial Sequence
  Description of Artificial Sequence: Synthetic polypeptide
MGPQLLGYVVLCLLGAGPLEAQVTQNPRYLITVTGKKLTVTCSQNMNHEYMSWYRQDPGLGLRQIYYSMNVEVTDKGDVPEGYKVSRKEKRNFPLILESPSPNQTSLYFCASSLYSTDTQYFGPGTRLTVLEDLKNV

SEQ ID NO: 4321 - protein, 142 aa, Artificial Sequence
  Description of Artificial Sequence: Synthetic polypeptide
MSIGLLCCAALSLLWAGPVNAGVTQTPKFQVLKTGQSMTLQCAQDMNHEYMSWYRQDPGMGLRLIHYSVGAGITDQGEVPNGYNVSRSTTEDFPLRLLSAAPSQTSVYFCASSYLSPAAGFSYEQYFGPGTRLTVTEDLKNV

SEQ ID NO: 4322 - protein, 138 aa, Artificial Sequence
  Description of Artificial Sequence: Synthetic polypeptide
MGTSLLCWMALCLLGADHADTGVSQNPRHKITKRGQNVTFRCDPISEHNRLYWYRQTLGQGPEFLTYFQNEAQLEKSRLLSDRFSAERPKGSFSTLEIQRTEQGDSAMYLCASSLATVYEQYFGPGTRLTVTEDLKNV

SEQ ID NO: 4323 - protein, 138 aa, Artificial Sequence
  Description of Artificial Sequence: Synthetic polypeptide
MGTSLLCWMALCLLGADHADTGVSQNPRHKITKRGQNVTFRCDPISEHNRLYWYRQTLGQGPEFLTYFQNEAQLEKSRLLSDRFSAERPKGSFSTLEIQRTEQGDSAMYLCASSLANTGELFFGEGSRLTVLEDLKNV

SEQ ID NO: 4324 - protein, 139 aa, Artificial Sequence
  Description of Artificial Sequence: Synthetic polypeptide
MGFRLLCCVAFCLLGAGPVDSGVTQTPKHLITATGQRVTLRCSPRSGDLSVYWYQQSLDQGLQFLIQYYNGEERAKGNILERFSAQQFPDLHSELNLSSLELGDSALYFCASSGTGGAYNEQFFGPGTRLTVLEDLKNV

SEQ ID NO: 4325 - protein, 139 aa, Artificial Sequence
  Description of Artificial Sequence: Synthetic polypeptide
MGPQLLGYVVLCLLGAGPLEAQVTQNPRYLITVTGKKLTVTCSQNMNHEYMSWYRQDPGLGLRQIYYSMNVEVTDKGDVPEGYKVSRKEKRNFPLILESPSPNQTSLYFCASSTSLELDQPQHFGDGTRLSILEDLNKV

SEQ ID NO: 4326 - protein, 137 aa, Artificial Sequence
  Description of Artificial Sequence: Synthetic polypeptide
MSLGLLCCGAFSLLWAGPVNAGVTQTPKFRVLKTGQSMTLLCAQDMNHEYMYWYRQDPGMGLRLIHYSVGEGTTAKGEVPDGYNVSRLKKQNFLLGLESAAPSQTSVYFCASSSTDLNEQFFGPGTRLTVLEDLKNV

SEQ ID NO: 4327 - protein, 138 aa, Artificial Sequence
  Description of Artificial Sequence: Synthetic polypeptide
MGCRLLCCAVLCLLGAVPMETGVTQTPRHLVMGMTNKKSLKCEQHLGHNAMYWYKQSAKKPLELMFVYSLEERVENNSVPSRFSPECPNSSHLFLHLHTLQPEDSALYLCASSQGRGKNIQYFGAGTRLSVLEDLKNV

SEQ ID NO: 4328 - protein, 139 aa, Artificial Sequence
  Description of Artificial Sequence: Synthetic polypeptide
MGTSLLCWVVLGFLGTDHTGAGVSQSPRYKVTKRGQDVALRCDPISGHVSLYWYRQALGQGPEFLTYFNYEAQQDKSGLPNDRFSAERPEGSISTLTIQRTEQRDSAMYRCASSPGQQNTEAFFGQGTRLTVVEDLNKV

SEQ ID NO: 4329 - protein, 140 aa, Artificial Sequence
  Description of Artificial Sequence: Synthetic polypeptide
MGTSLLCWVVLGFLGTDHTGAGVSQSPRYKVTKRGQDVALRCDPISGHVSLYWYRQALGQGPEFLTYFNYEAQQDKSGLPNDRFSAERPEGSISTLTIQRTEQRDSAMYRCASSWGGSNTGELFFGEGSRLTVLEDLKNV

SEQ ID NO: 4330 - protein, 139 aa, Artificial Sequence
  Description of Artificial Sequence: Synthetic polypeptide
MGTSLLCWVVLGFLGTDHTGAGVSQSPRYKVTKRGQDVALRCDPISGHVSLYWYRQALGQGPEFLTYFNYEAQQDKSGLPNDRFSAERPEGSISTLTIQRTEQRDSAMYRCASSLGLLYNEQFFGPGTRLTVLEDLKNV

SEQ ID NO: 4331 - protein, 136 aa, Artificial Sequence
  Description of Artificial Sequence: Synthetic polypeptide
MGSWTLCCVSLCILVAKHTDAGVIQSPRHEVTEMGQEVTLRCKPISGHDYLFWYRQTMMRGLELLIYFNNNVPIDDSGMPEDRFSAKMPNASFSTLKIQPSEPRDSAVYFCASQSGDTQYFGPGTRLTVLEDLKNV

SEQ ID NO: 4332 - DNA, 2941 bp, Artificial Sequence
  Description of Artificial Sequence: Synthetic polynucleotide
  misc_feature (1)..(544): EF1a Promoter
  misc_feature (545)..(550): XbaI Restriction Site
  misc_feature (551)..(559): Kozak
  misc_feature (560)..(622): CD8 Signal Peptide
  modified_base (623)..(802): a, c, t, g, unknown or other
  misc_feature (623)..(802): Beta Variable
  misc_feature (803)..(1333): Beta Constant
  misc_feature (971)..(973): Introduced Cysteine for preferential pairing
  misc_feature (1334)..(1399): P2A Peptide
  misc_feature (1400)..(1462): CD8 Signal Peptide
  modified_base (1463)..(1687): a, c, t, g, unknown or other
  misc_feature (1463)..(1687): Alpha Variable
  misc_feature (1688)..(2113): Alpha Constant
  misc_feature (1832)..(1834): Cysteine
  misc_feature (2114)..(2121): NotI Restriction Site
  misc_feature (2123)..(2176): T2A Peptide
  misc_feature (2183)..(2941): Copepod GFP
ggatctgcgatcgctccggtgcccgtcagtgggcagagcgcacatcgcccacagtccccgagaagttggggggaggggtcggcaattgaacgggtgcctagagaaggtggcgcggggtaaactgggaaagtgatgtcgtgtactggctccgcctttttcccgagggtgggggagaaccgtatataagtgcagtagtcgccgtgaacgttctttttcgcaacgggtttgccgccagaacacagctgaagcttcgaggggctcgcatctctccttcacgcgcccgccgccctacctgaggccgccatccacgccggttgagtcgcgttctgccgcctcccgcctgtggtgcctcctgaactgcgtccgccgtctaggtaagtttaaagctcaggtcgagaccgggcctttgtccggcgctcccttggagcctacctagactcagccggctctccacgctttgcctgaccctgcttgctcaactctacgtctttgtttcgttttctgttctgcgccgttacagatccaagctgtgaccggcgcctactctagagccgccaccatggccctgcctgtgacagccctgctgctgcctctggctctgctgctgcatgccgctagacccnnnnnnnnnnnnnnnnnnnnnnnnnnnnnnnnnnnnnnnnnnnnnnnnnnnnnnnnnnnnnnnnnnnnnnnnnnnnnnnnnnnnnnnnnnnnnnnnnnnnnnnnnnnnnnnnnnnnnnnnnnnnnnnnnnnnnnnnnnnnnnnnnnnnnnnnnnnnnnnnnnnnnnnnnnnnnnnnnnnngaggacctgaacaaggtgttcccacccgaggtcgctgtgtttgagccatcagaagcagagatctcccacacccaaaaggccacactggtgtgcctggccacaggcttcttccccgaccacgtggagctgagctggtgggtgaatgggaaggaggtgcacagtggggtctgcacggacccgcagcccctcaaggagcagcccgccctcaatgactccagatactgcctgagcagccgcctgagggtctcggccaccttctggcagaacccccgcaaccacttccgctgtcaagtccagttctacgggctctcggagaatgacgagtggacccaggatagggccaaacccgtcacccagatcgtcagcgccgaggcctggggtagagcagactgtggctttacctcggtgtcctaccagcaaggggtcctgtctgccaccatcctctatgagatcctgctagggaaggccaccctgtatgctgtgctggtcagcgcccttgtgttgatggccatggtcaagagaaaggatttcggctccggagccacgaacttctctctgttaaagcaagcaggagacgtggaagaaaaccccggtcccatggccctgcctgtgacagccctgctgctgcctctggctctgctgctgcatgccgctagacccnnnnnnnnnnnnnnnnnnnnnnnnnnnnnnnnnnnnnnnnnnnnnnnnnnnnnnnnnnnnnnnnnnnnnnnnnnnnnnnnnnnnnnnnnnnnnnnnnnnnnnnnnnnnnnnnnnnnnnnnnnnnnnnnnnnnnnnnnnnnnnnnnnnnnnnnnnnnnnnnnnnnnnnnnnnnnnnnnnnnnnnnnnnnnnnnnnnnnnnnnnnnnnnnnnnnnnnnnnnnnnnnnccaaatatccagaaccctgaccctgccgtgtaccagctgagagactctaaatccagtgacaagtctgtctgcctattcaccgattttgattctcaaacaaatgtgtcacaaagtaaggattctgatgtgtatatcacagacaaatgcgtgctagacatgaggtctatggacttcaagagcaacagtgctgtggcctggagcaacaaatctgactttgcatgtgcaaacgccttcaacaacagcattattccagaagacaccttcttccccagcccagaaagttcctgtgatgtcaagctggtcgagaaaagctttgaaacagatacgaacctaaactttcaaaacctgtcagtgattgggttccgaatcctcctcctgaaagtggccgggtttaatctgctcatgacgctgcggctgtggtccagcgcggccgctgagggcagaggaagtcttctaacatgcggtgacgtggaggagaatcccggcccttccggaatggagagcgacgagagcggcctgcccgccatggagatcgagtgccgcatcaccggcaccctgaacggcgtggagttcgagctggtgggcggcggagagggcacccccaagcagggccgcatgaccaacaagatgaagagcaccaaaggcgccctgaccttcagcccctacctgctgagccacgtgatgggctacggcttctaccacttcggcacctaccccagcggctacgagaaccccttcctgcacgccatcaacaacggcggctacaccaacacccgcatcgagaagtacgaggacggcggcgtgctgcacgtgagcttcagctaccgctacgaggccggccgcgtgatcggcgacttcaaggtggtgggcaccggcttccccgaggacagcgtgatcttcaccgacaagatcatccgcagcaacgccaccgtggagcacctgcaccccatgggcgataacgtgctggtgggcagcttcgcccgcaccttcagcctgcgcgacggcggctactacagcttcgtggtggacagccacatgcacttcaagagcgccatccaccccagcatcctgcagaacgggggccccatgttcgccttccgccgcgtggaggagctgcacagcaacaccgagctgggcatcgtggagtaccagcacgccttcaagacccccatcgccttcgccagatcccgcgctcagtcgtccaattctgccgtggacggcaccgccggacccggctccaccggatctcgctag

SEQ ID NO: 4333 - DNA, 3193 bp, Artificial Sequence
  Description of Artificial Sequence: Synthetic polynucleotide
  misc_feature (1)..(544): EF1a Promoter
  misc_feature (545)..(550): XbaI Restriction Site
  misc_feature (551)..(559): Kozak
  misc_feature (560)..(622): CD8 Signal Peptide
  misc_feature (623)..(955): Beta Variable
  misc_feature (956)..(1486): Beta Constant
  misc_feature (1124)..(1126): Introduced Cysteine for preferential pairing
  misc_feature (1487)..(1552): P2A Peptide
  misc_feature (1553)..(1615): CD8 Signal Peptide
  misc_feature (1616)..(1939): Alpha Variable
  misc_feature (1940)..(2365): Alpha Constant
  misc_feature (2084)..(2086): Cysteine
  misc_feature (2366)..(2373): NotI Restriction Site
  misc_feature (2375)..(2428): T2A Peptide
  misc_feature (2435)..(3193): Copepod GFP
ggatctgcgatcgctccggtgcccgtcagtgggcagagcgcacatcgcccacagtccccgagaagttggggggaggggtcggcaattgaacgggtgcctagagaaggtggcgcggggtaaactgggaaagtgatgtcgtgtactggctccgcctttttcccgagggtgggggagaaccgtatataagtgcagtagtcgccgtgaacgttctttttcgcaacgggtttgccgccagaacacagctgaagcttcgaggggctcgcatctctccttcacgcgcccgccgccctacctgaggccgccatccacgccggttgagtcgcgttctgccgcctcccgcctgtggtgcctcctgaactgcgtccgccgtctaggtaagtttaaagctcaggtcgagaccgggcctttgtccggcgctcccttggagcctacctagactcagccggctctccacgctttgcctgaccctgcttgctcaactctacgtctttgtttcgttttctgttctgcgccgttacagatccaagctgtgaccggcgcctactctagagccgccaccatggccctgcctgtgacagccctgctgctgcctctggctctgctgctgcatgccgctagacccggagtctcccagaaccccagacacaagatcacaaagaggggacagaatgtaactttcaggtgtgatccaatttctgaacacaaccgcctttattggtaccgacagaccctggggcagggcccagagtttctgacttacttccagaatgaagctcaactagaaaaatcaaggctgctcagtgatcggttctctgcagagaggcctaagggatctttctccaccttggagatccagcgcacagagcagggggactcggccatgtatctctgtgccagcagcttagcgacagtctacgagcagtacttcgggccgggcaccaggctcacggtcacagaggacctgaacaaggtgttcccacccgaggtcgctgtgtttgagccatcagaagcagagatctcccacacccaaaaggccacactggtgtgcctggccacaggcttcttccccgaccacgtggagctgagctggtgggtgaatgggaaggaggtgcacagtggggtctgcacggacccgcagcccctcaaggagcagcccgccctcaatgactccagatactgcctgagcagccgcctgagggtctcggccaccttctggcagaacccccgcaaccacttccgctgtcaagtccagttctacgggctctcggagaatgacgagtggacccaggatagggccaaacccgtcacccagatcgtcagcgccgaggcctggggtagagcagactgtggctttacctcggtgtcctaccagcaaggggtcctgtctgccaccatcctctatgagatcctgctagggaaggccaccctgtatgctgtgctggtcagcgcccttgtgttgatggccatggtcaagagaaaggatttcggctccggagccacgaacttctctctgttaaagcaagcaggagacgtggaagaaaaccccggtcccatggccctgcctgtgacagccctgctgctgcctctggctctgctgctgcatgccgctagacccgaggatgtggagcagagtcttttcctgagtgtccgagagggagacagctccgttataaactgcacttacacagacagctcctccacctacttatactggtataagcaagaacctggagcaggtctccagttgctgacgtatattttttcaaatatggacatgaaacaagaccaaagactcactgttctattgaataaaaaggataaacatctgtctctgcgcattgcagacacccagactggggactcagctatctacttctgtgcagggccgggcgggtaccagaaagttacctttggaattggaacaaagctccaagtcatcccaaatatccagaaccctgaccctgccgtgtaccagctgagagactctaaatccagtgacaagtctgtctgcctattcaccgattttgattctcaaacaaatgtgtcacaaagtaaggattctgatgtgtatatcacagacaaatgcgtgctagacatgaggtctatggacttcaagagcaacagtgctgtggcctggagcaacaaatctgactttgcatgtgcaaacgccttcaacaacagcattattccagaagacaccttcttccccagcccagaaagttcctgtgatgtcaagctggtcgagaaaagctttgaaacagatacgaacctaaactttcaaaacctgtcagtgattgggttccgaatcctcctcctgaaagtggccgggtttaatctgctcatgacgctgcggctgtggtccagcgcggccgctgagggcagaggaagtcttctaacatgcggtgacgtggaggagaatcccggcccttccggaatggagagcgacgagagcggcctgcccgccatggagatcgagtgccgcatcaccggcaccctgaacggcgtggagttcgagctggtgggcggcggagagggcacccccaagcagggccgcatgaccaacaagatgaagagcaccaaaggcgccctgaccttcagcccctacctgctgagccacgtgatgggctacggcttctaccacttcggcacctaccccagcggctacgagaaccccttcctgcacgccatcaacaacggcggctacaccaacacccgcatcgagaagtacgaggacggcggcgtgctgcacgtgagcttcagctaccgctacgaggccggccgcgtgatcggcgacttcaaggtggtgggcaccggcttccccgaggacagcgtgatcttcaccgacaagatcatccgcagcaacgccaccgtggagcacctgcaccccatgggcgataacgtgctggtgggcagcttcgcccgcaccttcagcctgcgcgacggcggctactacagcttcgtggtggacagccacatgcacttcaagagcgccatccaccccagcatcctgcagaacgggggccccatgttcgccttccgccgcgtggaggagctgcacagcaacaccgagctgggcatcgtggagtaccagcacgccttcaagacccccatcgccttcgccagatcccgcgctcagtcgtccaattctgccgtggacggcaccgccggacccggctccaccggatctcgctag

SEQ ID NO: 4334 - DNA, 3196 bp, Artificial Sequence
  Description of Artificial Sequence: Synthetic polynucleotide
  misc_feature (1)..(544): EF1a Promoter
  misc_feature (545)..(550): XbaI Restriction Site
  misc_feature (551)..(559): Kozak
  misc_feature (560)..(622): CD8 Signal Peptide
  misc_feature (623)..(952): Beta Variable
  misc_feature (953)..(1483): Beta Constant
  misc_feature (1121)..(1123): Introduced Cysteine for preferential pairing
  misc_feature (1484)..(1549): P2A Peptide
  misc_feature (1550)..(1612): CD8 Signal Peptide
  misc_feature (1613)..(1942): Alpha Variable
  misc_feature (1943)..(2368): Alpha Constant
  misc_feature (2087)..(2089): Cysteine
  misc_feature (2369)..(2376): NotI Restriction Site
  misc_feature (2378)..(2431): T2A Peptide
  misc_feature (2438)..(3196): Copepod GFP
ggatctgcgatcgctccggtgcccgtcagtgggcagagcgcacatcgcccacagtccccgagaagttggggggaggggtcggcaattgaacgggtgcctagagaaggtggcgcggggtaaactgggaaagtgatgtcgtgtactggctccgcctttttcccgagggtgggggagaaccgtatataagtgcagtagtcgccgtgaacgttctttttcgcaacgggtttgccgccagaacacagctgaagcttcgaggggctcgcatctctccttcacgcgcccgccgccctacctgaggccgccatccacgccggttgagtcgcgttctgccgcctcccgcctgtggtgcctcctgaactgcgtccgccgtctaggtaagtttaaagctcaggtcgagaccgggcctttgtccggcgctcccttggagcctacctagactcagccggctctccacgctttgcctgaccctgcttgctcaactctacgtctttgtttcgttttctgttctgcgccgttacagatccaagctgtgaccggcgcctactctagagccgccaccatggccctgcctgtgacagccctgctgctgcctctggctctgctgctgcatgccgctagaccccaagtgacccagaacccaagatacctcatcacagtgactggaaagaagttaacagtgacttgttctcagaatatgaaccatgagtatatgtcctggtatcgacaagacccagggctgggcttaaggcagatctactattcaatgaatgttgaggtgactgataagggagatgttcctgaagggtacaaagtctctcgaaaagagaagaggaatttccccctgatcctggagtcgcccagccccaaccagacctctctgtacttctgtgccagcagtacgacagggtcttcacccctccactttgggaacgggaccaggctcactgtgacagaggacctgaacaaggtgttcccacccgaggtcgctgtgtttgagccatcagaagcagagatctcccacacccaaaaggccacactggtgtgcctggccacaggcttcttccccgaccacgtggagctgagctggtgggtgaatgggaaggaggtgcacagtggggtctgcacggacccgcagcccctcaaggagcagcccgccctcaatgactccagatactgcctgagcagccgcctgagggtctcggccaccttctggcagaacccccgcaaccacttccgctgtcaagtccagttctacgggctctcggagaatgacgagtggacccaggatagggccaaacccgtcacccagatcgtcagcgccgaggcctggggtagagcagactgtggctttacctcggtgtcctaccagcaaggggtcctgtctgccaccatcctctatgagatcctgctagggaaggccaccctgtatgctgtgctggtcagcgcccttgtgttgatggccatggtcaagagaaaggatttcggctccggagccacgaacttctctctgttaaagcaagcaggagacgtggaagaaaaccccggtcccatggccctgcctgtgacagccctgctgctgcctctggctctgctgctgcatgccgctagacccaaacaggaggtgacacagattcctgcagctctgagtgtcccagaaggagaaaacttggttctcaactgcagtttcactgatagcgctatttacaacctccagtggtttaggcaggaccctgggaaaggtctcacatctctgttgcttattcagtcaagtcagagagagcaaacaagtggaagacttaatgcctcgctggataaatcatcaggacgtagtactttatacattgcagcttctcagcctggtgactcagccacctacctctgtgctgttgataactatggtcagaattttgtctttggtcccggaaccagattgtccgtgctgccaaatatccagaaccctgaccctgccgtgtaccagctgagagactctaaatccagtgacaagtctgtctgcctattcaccgattttgattctcaaacaaatgtgtcacaaagtaaggattctgatgtgtatatcacagacaaatgcgtgctagacatgaggtctatggacttcaagagcaacagtgctgtggcctggagcaacaaatctgactttgcatgtgcaaacgccttcaacaacagcattattccagaagacaccttcttccccagcccagaaagttcctgtgatgtcaagctggtcgagaaaagctttgaaacagatacgaacctaaactttcaaaacctgtcagtgattgggttccgaatcctcctcctgaaagtggccgggtttaatctgctcatgacgctgcggctgtggtccagcgcggccgctgagggcagaggaagtcttctaacatgcggtgacgtggaggagaatcccggcccttccggaatggagagcgacgagagcggcctgcccgccatggagatcgagtgccgcatcaccggcaccctgaacggcgtggagttcgagctggtgggcggcggagagggcacccccaagcagggccgcatgaccaacaagatgaagagcaccaaaggcgccctgaccttcagcccctacctgctgagccacgtgatgggctacggcttctaccacttcggcacctaccccagcggctacgagaaccccttcctgcacgccatcaacaacggcggctacaccaacacccgcatcgagaagtacgaggacggcggcgtgctgcacgtgagcttcagctaccgctacgaggccggccgcgtgatcggcgacttcaaggtggtgggcaccggcttccccgaggacagcgtgatcttcaccgacaagatcatccgcagcaacgccaccgtggagcacctgcaccccatgggcgataacgtgctggtgggcagcttcgcccgcaccttcagcctgcgcgacggcggctactacagcttcgtggtggacagccacatgcacttcaagagcgccatccaccccagcatcctgcagaacgggggccccatgttcgccttccgccgcgtggaggagctgcacagcaacaccgagctgggcatcgtggagtaccagcacgccttcaagacccccatcgccttcgccagatcccgcgctcagtcgtccaattctgccgtggacggcaccgccggacccggctccaccggatctcgctag

SEQ ID NO: 4335 - protein, 11 aa, Homo sapiens
YSEHPTFTSQY

SEQ ID NO: 4336 - protein, 9 aa, Homo sapiens
VSDGGPNLY

SEQ ID NO: 4337 - protein, 9 aa, Homo sapiens
ATDALMTGY

SEQ ID NO: 4338 - protein, 9 aa, Homo sapiens
LLFGYPVYV

SEQ ID NO: 4339 - protein, 9 aa, Homo sapiens
GILGFVFTL

SEQ ID NO: 4340 - protein, 9 aa, Homo sapiens
FLLTRILTI

SEQ ID NO: 4341 - protein, 9 aa, Homo sapiens
IVTDFSVIK

SEQ ID NO: 4342 - protein, 9 aa, Homo sapiens
KSMREEYRK

SEQ ID NO: 4343 - protein, 10 aa, Homo sapiens
SSCSSCPLSK

SEQ ID NO: 4344 - protein, 9 aa, Homo sapiens
ATIGTAMYK

SEQ ID NO: 4345 - protein, 10 aa, Homo sapiens
AVFDRKSDAK

SEQ ID NO: 4346 - protein, 9 aa, Homo sapiens
SIIPSGPLK

SEQ ID NO: 4347 - protein, 9 aa, Homo sapiens
IPSINVHHY

SEQ ID NO: 4348 - protein, 11 aa, Homo sapiens
EPLPQGQLTAY

SEQ ID NO: 4349 - protein, 10 aa, Homo sapiens
VPLDEDFRKY

SEQ ID NO: 4350 - protein, 9 aa, Homo sapiens
RLRAEAQVK

SEQ ID NO: 4351 - protein, 9 aa, Homo sapiens
RLRPGGKKK

SEQ ID NO: 4352 - protein, 10 aa, Homo sapiens
QVPLRPMTYK

SEQ ID NO: 4353 - protein, 9 aa, Homo sapiens
QYDPVAALF

SEQ ID NO: 4354 - protein, 9 aa, Homo sapiens
TYGPVFMSL

SEQ ID NO: 4355 - protein, 9 aa, Homo sapiens
KYTSFPWLL

SEQ ID NO: 4356 - protein, 9 aa, Homo sapiens
TYGPVFMCL

SEQ ID NO: 4357 - protein, 9 aa, Homo sapiens
RYLKDQQLL

SEQ ID NO: 4358 - protein, 9 aa, Homo sapiens
PYLFWLAAI

SEQ ID NO: 4359 - protein, 406 aa, Artificial Sequence
  Description of Artificial Sequence: Synthetic polypeptide
MGSHSMRYFFTSVSRPGRGEPRFIAVGYVDDTQFVRFDSDAASQKMEPRAPWIEQEGPEYWDQETRNMKAHSQTDRANLGTLRGYYNQSEDGSHTIQIMYGCDVGPDGRFLRGYRQDAYDGKDYIALNEDLRSWTAADMAAQITKRKWEAVHAAEQRRVYLEGRCVDGLRRYLENGKETLQRTDPPKTHMTHHPISDHEATLRCWALGFYPAEITLTWQRDGEDQTQDTELVETRPAGDGTFQKWAAVVVPSGEEQRYTCHVQHEGLPKPLTLRGGGGGGGGGGGMGIQRTPKIQVYSRHPAENGKSNFLNCYVSGFHPSDIEVDLLKNGERIEKVEHSDLSFSKDWSFYLLYYTEFTPTEKDEYACRVNHVTLSQPKIVKWDRDMGGGGGGGGGGGNTDNNLAVY

SEQ ID NO: 4360 - protein, 36 aa, Artificial Sequence
  Description of Artificial Sequence: Synthetic polypeptide
WIEQEGPEYWDQETRNMKAHSQTDRANLGTLRGYYN

SEQ ID NO: 4361 - protein, 27 aa, Artificial Sequence
  Description of Artificial Sequence: Synthetic peptide
DMAAQITKRKWEAVHAAEQRRVYLEGR

SEQ ID NO: 4362 - protein, 11 aa, Homo sapiens
GEMSSNASTAL

SEQ ID NO: 4363 - protein, 8 aa, Homo sapiens
RAKFKQLL
